United States Patent Application Publication US 2004/0005579 A1 - sequence listing, part 2

SEQ ID NO: 1766 - DNA, 358 bp, Homo sapiens
  misc_feature (312)..(312): n equals a,t,g, or c
  misc_feature (327)..(327): n equals a,t,g, or c
  misc_feature (339)..(339): n equals a,t,g, or c
  misc_feature (348)..(348): n equals a,t,g, or c
  misc_feature (358)..(358): n equals a,t,g, or c
ggcctcagcagcgcgaggtgctgcggcgctgcgtagaagtatcaatcagctcggttgcttttgtgagaagaattccttggactgcggcgtcgagtcagctgaaagaacactttgcacagttcggccatgtcagaaggtgcattttaccttttgacaaggagactggctttcacagaggtttgggttgggttcagttttcttcagaagaaggacttcggaatgcactacaacaggaaaatcatattatagatggagaaaggccaggtacactaaaggcaacttcgaacttatataaagaagattttgaatgancatataagtactctnaaaaaaaaaggngccgttagnccactatccn

SEQ ID NO: 1767 - DNA, 348 bp, Homo sapiens
  misc_feature (314)..(315): n equals a,t,g, or c
  misc_feature (319)..(319): n equals a,t,g, or c
  misc_feature (341)..(341): n equals a,t,g, or c
  misc_feature (343)..(343): n equals a,t,g, or c
gcggacgcgtgggtttgagttagtcacctcggggattttttccattttgcagtaaaatgttaaattaatgtagcctgcctctatttgttgggcaggtaatttcaaagggttatttgcctcatctcctatctttagtgaaatcttatgtgtaattgtgtgtatttattcaccgtgggaacagagaatacctgtttagtgtgactttagactggtgtctgtttgtaatgagtggcccaaatttcttattttaaaaatgtatagcttaaatttgattattttgctgtggataatcatgaatgaaaaaccatcattannattnctaaaaaaaaaggggccgttananaccat

SEQ ID NO: 1768 - DNA, 705 bp, Homo sapiens
  misc_feature (564)..(564): n equals a,t,g, or c
gatcccttaagaatgagtttcttagacttttccaatatgtgattttttttcccatttagaatggtgattttaaatgtgtgagtgcatgtactatcttatctcagatatttgcacccccaatctgcccccaactcccaaaagctagaacactgccaactgatctgttataggtcctttagaaacacataattaacacttaaggttgggtgctgctaattctttgcaaaaatccaaatattgttaagggaccagggagatgccactaccccttgattttccatctaaaaatatacatgtttatgtaaacaaatctttccatatccatagtgacttttcaagtatttaagcctaaagattttgatctcacatttttatacctgtttaaattgctcacagttattacatacacatcagccatcaactaaagttgtactttaaaaatttactacaatatgtacatttctaagtcaaacacttgtgacttttgctttaattccatgaatgttcctgcctccttgatatttgtatttattctttttttctctagagtagaggtataattgngtgatatttcagaaatacagataaatgattcaaaaaggtcacagttaaggagaatcatggttctttgatcatgaataactgattaagtaagtcttgcctatattttcctggatagcatatgacaaatgtttctaagggacc

SEQ ID NO: 1769 - DNA, 167 bp, Homo sapiens
  misc_feature (5)..(5): n equals a,t,g, or c
  misc_feature (7)..(7): n equals a,t,g, or c
  misc_feature (84)..(84): n equals a,t,g, or c
  misc_feature (105)..(105): n equals a,t,g, or c
  misc_feature (147)..(147): n equals a,t,g, or c
  misc_feature (149)..(149): n equals a,t,g, or c
  misc_feature (157)..(157): n equals a,t,g, or c
gtggntngccttgtgatcctgcagccctgtgtgtcagcccaatgtcaatcaagatgggtgattatgaaatgccagacttctaanataaatgttttggaattcaangggtaaataaatgctgctttggggatattaaaaacaagaaanantcataagntgaacctgat

SEQ ID NO: 1770 - DNA, 382 bp, Homo sapiens
  misc_feature (307)..(307): n equals a,t,g, or c
  misc_feature (338)..(338): n equals a,t,g, or c
  misc_feature (376)..(376): n equals a,t,g, or c
  misc_feature (378)..(378): n equals a,t,g, or c
  misc_feature (380)..(380): n equals a,t,g, or c
cgcaggaaatgcatcaaaagacttaaaggtaaagccgtattacccctcgtcacttgcaacttgctattcgtggagatgaagaattggattctctcatcaaggctacaattgctggtggtggtgtcattccacacatccacaaatctctgattgggaagaaaggacaacagaagactgtctaaaggatgcctggattccttgttatctcaggactctaaatctctaacagctgccagtgtggtgttcagtggctgacttggaaaccatttgctttgaattttacagtgagtatacttcaccaatcgtnagtaccttaggcggtcaacttgttaggggtntgtcgttaacgtgtatgacattgcactgtgccttctgnananag

SEQ ID NO: 1771 - DNA, 567 bp, Homo sapiens
  misc_feature (2)..(2): n equals a,t,g, or c
  misc_feature (68)..(68): n equals a,t,g, or c
  misc_feature (493)..(493): n equals a,t,g, or c
  misc_feature (503)..(503): n equals a,t,g, or c
  misc_feature (553)..(553): n equals a,t,g, or c
  misc_feature (558)..(558): n equals a,t,g, or c
tntggtacgcctgccggtaccggtccggaattcccgggtcgacccacgcgtccggcgacatggccaancgtaccaagaaagtcgggatcgtcggtaaatacgggacccgctatggggcctccctccggaaaatggtgaagaaaattgaaatcagccagcacgccaagtacacttgctctttctgtggcaaaaccaagatgaagagacgagctgtggggatctggcactgtggttcctgcatgaagacagtggctggcggtgcctggacgtacaataccacttccgctgtcacggtaaagtccgccatcagaagactgaaggagttgaaagaccagtagacgctcctctactctttgagacatcactggcctataataaatgggttaatttatgtaacaaaattgccttggcttgttaactttattagacattctgatgtttgcattgtgtaaatactgttgtattggaaaagcatgccaagatggattattgnaattcagtgncttttttagtaagtcaaatggtaaaatgcagcataagaatataagtcttncaagntaaaaaaaa

SEQ ID NO: 1772 - DNA, 564 bp, Homo sapiens
  misc_feature (367)..(369): n equals a,t,g, or c
  misc_feature (372)..(372): n equals a,t,g, or c
  misc_feature (374)..(374): n equals a,t,g, or c
  misc_feature (377)..(380): n equals a,t,g, or c
  misc_feature (384)..(384): n equals a,t,g, or c
  misc_feature (386)..(386): n equals a,t,g, or c
  misc_feature (390)..(391): n equals a,t,g, or c
  misc_feature (393)..(394): n equals a,t,g, or c
  misc_feature (399)..(399): n equals a,t,g, or c
  misc_feature (412)..(412): n equals a,t,g, or c
  misc_feature (414)..(414): n equals a,t,g, or c
  misc_feature (429)..(429): n equals a,t,g, or c
  misc_feature (448)..(448): n equals a,t,g, or c
  misc_feature (513)..(517): n equals a,t,g, or c
gcgaatgcgcaggctgaagcgcaaaagaagaaagatgaggcagaggtccaagtaaaccgctagcttgttgcaccgtggaggccacaggagcagaaacatggaatgccagacgctggggatgctggtacaagttgtgggactgcatgctactgtctagagcttgtctcaatggatctagaacttcatcgccctctgatcgccgatcacctctgagacccaccttgctcataaacaaaatgcccatgttggtcctctgccctggacctgtgacattctggactatttctgtgtttatttgtggccgagtgtaacaaccatataataaatcacctcttccgctgttttagctgaagaattaaaaaaaaannnaanantcnnnncacntnaaannannaaaanaaagggcggccgntntagaggatccaaagnttacgtacgcgtgcatgcnacggcatagctttttctataggggcacctaaaattcaaattcactggcccgccgtttacaaacgnnnnngactggggaaaacccttggggggtacccaacttaaaacgccttggag

SEQ ID NO: 1773 - DNA, 618 bp, Homo sapiens
  misc_feature (15)..(15): n equals a,t,g, or c
  misc_feature (25)..(25): n equals a,t,g, or c
  misc_feature (46)..(46): n equals a,t,g, or c
  misc_feature (75)..(75): n equals a,t,g, or c
  misc_feature (98)..(98): n equals a,t,g, or c
  misc_feature (102)..(102): n equals a,t,g, or c
  misc_feature (105)..(105): n equals a,t,g, or c
  misc_feature (195)..(195): n equals a,t,g, or c
  misc_feature (229)..(229): n equals a,t,g, or c
  misc_feature (345)..(345): n equals a,t,g, or c
  misc_feature (351)..(351): n equals a,t,g, or c
  misc_feature (374)..(374): n equals a,t,g, or c
  misc_feature (386)..(386): n equals a,t,g, or c
  misc_feature (396)..(396): n equals a,t,g, or c
  misc_feature (399)..(399): n equals a,t,g, or c
  misc_feature (418)..(418): n equals a,t,g, or c
  misc_feature (422)..(422): n equals a,t,g, or c
  misc_feature (480)..(481): n equals a,t,g, or c
  misc_feature (485)..(485): n equals a,t,g, or c
  misc_feature (488)..(489): n equals a,t,g, or c
  misc_feature (497)..(498): n equals a,t,g, or c
  misc_feature (506)..(506): n equals a,t,g, or c
  misc_feature (527)..(527): n equals a,t,g, or c
  misc_feature (547)..(547): n equals a,t,g, or c
  misc_feature (561)..(561): n equals a,t,g, or c
  misc_feature (568)..(568): n equals a,t,g, or c
  misc_feature (574)..(574): n equals a,t,g, or c
gcggacgcgtgggcnaggctgcggngtctgctgctattctccgagnttcgcaatgccgcctaaggacgacaagangaagaaggacgctggaaagacgnccanganagacaaagacccagtgaacaaatccgggggcaaggccaaaaagaagaagtggtccaaaggcaaagttcggtacaagctcaataacttagncttgtttgacaaagctacctatgataaactctgnaaggaagttcccaactataaacttataaccccagctgtggtctctgagagactgaagattcgaggctccctggccagggcagcccttcaggagctccttagtaaaggacttatcanactggnttcaaagcacagagctcaagtantttacaccaganataccaaggntgnagatgctccagctgctggngaanatgcatgaataggtccaaccagctgtacatttggaaaaataaaaactttattaaatcnntatnccnnaaaaaggnnaaggggcnggcccggtctacaaggatccngctttacggaccgccgggcntgcgaacgtcttancttcttnctatanggggcccctaaaattcaattcccctggggcccccgttttcaacc

SEQ ID NO: 1774 - DNA, 549 bp, Homo sapiens
  misc_feature (400)..(400): n equals a,t,g, or c
  misc_feature (442)..(442): n equals a,t,g, or c
  misc_feature (453)..(453): n equals a,t,g, or c
  misc_feature (473)..(473): n equals a,t,g, or c
  misc_feature (480)..(480): n equals a,t,g, or c
  misc_feature (527)..(527): n equals a,t,g, or c
  misc_feature (545)..(545): n equals a,t,g, or c
gcttgacgattgagcacagtcaggcctttgtattaaaaatgaaaaatgaaaaaacaaattcaaaacctattcaaatgggttctagttcaatttgtctagtataaattgtcatagctggtttactgaaaacaaacacatttaaaattggtttacctcaggatgacgtgcagaaaaatgggtgaaggataaaccgttgagacgtggccccactggtaggatggtcctcttgtacttcgtgtgctccgacccatggtgacgatgacacaccctggtggcatgcccgtgtatgttggttagcgttgtctgcattggtctagagtgaaacaggtgtcaggctgtcactgtcacacaaatttttaataagaaacatttaccaagggagcatctttggactctctgnttttaaaaccttctgaaccatgacttggaaccggcagaatangctgtggctgnggacttcaagcacaaccatnacattgntgtcaaagaaaatacaggttacgtccattccaagttgtaaaggtaanctttttttttttttcaanaaaa

SEQ ID NO: 1775 - DNA, 308 bp, Homo sapiens
  misc_feature (10)..(10): n equals a,t,g, or c
  misc_feature (22)..(22): n equals a,t,g, or c
  misc_feature (28)..(28): n equals a,t,g, or c
  misc_feature (36)..(36): n equals a,t,g, or c
  misc_feature (72)..(72): n equals a,t,g, or c
  misc_feature (108)..(108): n equals a,t,g, or c
  misc_feature (143)..(143): n equals a,t,g, or c
  misc_feature (159)..(159): n equals a,t,g, or c
  misc_feature (166)..(166): n equals a,t,g, or c
  misc_feature (177)..(177): n equals a,t,g, or c
  misc_feature (189)..(189): n equals a,t,g, or c
  misc_feature (200)..(200): n equals a,t,g, or c
  misc_feature (244)..(245): n equals a,t,g, or c
  misc_feature (247)..(247): n equals a,t,g, or c
  misc_feature (253)..(253): n equals a,t,g, or c
  misc_feature (270)..(270): n equals a,t,g, or c
ttctgggacncggagccccagnggcganccacgcgngcggctctatactagtttacctagtgaaaagctctnaactgcgctagtatggactttttggacagacttagnttttgcacataaccttgtacaatcttgcaacagangccagccacggaaganatatatntggactctatngcattataggantcttcttgctntgaatatccttgacattacagctgacaaaaacaaaaactggaanntnagatcngttttctgaaatctttnaagctaaaatcacatgcaagaattgactttgcagctac

SEQ ID NO: 1776 - DNA, 719 bp, Homo sapiens
  misc_feature (7)..(7): n equals a,t,g, or c
  misc_feature (10)..(10): n equals a,t,g, or c
  misc_feature (28)..(28): n equals a,t,g, or c
  misc_feature (32)..(32): n equals a,t,g, or c
  misc_feature (34)..(34): n equals a,t,g, or c
  misc_feature (96)..(96): n equals a,t,g, or c
  misc_feature (437)..(437): n equals a,t,g, or c
  misc_feature (475)..(475): n equals a,t,g, or c
  misc_feature (486)..(486): n equals a,t,g, or c
  misc_feature (529)..(529): n equals a,t,g, or c
  misc_feature (534)..(534): n equals a,t,g, or c
  misc_feature (547)..(547): n equals a,t,g, or c
  misc_feature (556)..(556): n equals a,t,g, or c
  misc_feature (654)..(654): n equals a,t,g, or c
  misc_feature (662)..(662): n equals a,t,g, or c
  misc_feature (674)..(675): n equals a,t,g, or c
  misc_feature (717)..(717): n equals a,t,g, or c
tccaacnggnaacttctataggcaattntggnanagcctgcccgtaccggtccggaattcccgggtcgacccacgcgtccggcaagcgccgtgatnagcgcctccaggccaagaaggaggagatcatcaagactttatccaaggaggaagagaccaagaaataaaacctcccactttgtctgtacatactggcctctgtgattacatagatcagccattaaaataaaacaagccttaaaaaaaaaaaaaaagggcggccgctctagaggatccaagcttacgtacgcgtgcatgcgacgtcatagctcttctatagtgtcacctaaattcaattcactggccgtcgttttacaacgtcgtgactgggaaaaccctggcgttacccaacttaatcgccttgcagcacattcccctttcgccagcttgcggaataaccnaaaaggcccgaaccgatggcccttccaacagttgcgcnagcctgaatgncgaatgggacgcgccctgtagccggcgcattaagcgcggcggntgtgntggttacgcgcancgtgaccgntacacttgccagcgccctagcgcccgctcctttcgctttcttcccttcctttcttgccacgttcgccggctttccccgtcagctctaaatcgggggcntcctttanggttccgattanngctttacgggaccttcgacccccaaaaaacttgattaagggnga

SEQ ID NO: 1777 - DNA, 430 bp, Homo sapiens
  misc_feature (2)..(2): n equals a,t,g, or c
  misc_feature (364)..(364): n equals a,t,g, or c
  misc_feature (422)..(422): n equals a,t,g, or c
  misc_feature (424)..(424): n equals a,t,g, or c
  misc_feature (429)..(430): n equals a,t,g, or c
gntggttctttatgacgcagagctaacctttgttcggcagcttgaaatttacagggcgagtaggcctgggaaacctctgaggcaagttataaagaatcacagctttcagttgcacagttctttaggatttaacccagaaactataccagttgcatgttagttttctttaatatccgttacgatgctgcttatgtttatgaaaccttattttgcttcctgatgaatctgggaagttggataggaaggatgtcaagtatcacagcagaacaacaaaccaaggggactgctcttgttctcgttacgtgctgctgtgcgttctctcctttattctttgggtattggtttgcatcgtatggggtactgnatctgaaaaagtctgggaaatgcataatattctaatttctaacaaaagttaatataananaaaann

SEQ ID NO: 1778 - DNA, 433 bp, Homo sapiens
  misc_feature (1)..(1): n equals a,t,g, or c
  misc_feature (23)..(23): n equals a,t,g, or c
  misc_feature (57)..(57): n equals a,t,g, or c
  misc_feature (253)..(253): n equals a,t,g, or c
  misc_feature (368)..(368): n equals a,t,g, or c
  misc_feature (383)..(383): n equals a,t,g, or c
  misc_feature (388)..(388): n equals a,t,g, or c
  misc_feature (395)..(395): n equals a,t,g, or c
  misc_feature (433)..(433): n equals a,t,g, or c
ntttccctgcactcatgaaaccncaataaatatcctcattgacaaccagaaaaaaanaaaaaaaagggcggccgctctagaggatccaagcttacgtacgcgtgcatgcgacgtcatagctcttctatagtgtcacctaaattcaattcactggccgtcgttttacaacgtcgtgactgggaaaaccctggcgttacccaacttaatcgccttgcagcacatccccctttcgccagctggcgtaatagcgaanaggcccgcaccgatcgcccttcccaacagttgcgcagcctgaatggcgaatgggacgcgccctgtagcggcgcattaagcgcggcgggtgtggtggttacgcgcagcgtgaccgntacacttgccagcgncctancgcccgntcctttcgctttcttcccttcctttatcgccacggttn

SEQ ID NO: 1779 - DNA, 466 bp, Homo sapiens
  misc_feature (459)..(459): n equals a,t,g, or c
  misc_feature (461)..(462): n equals a,t,g, or c
  misc_feature (465)..(466): n equals a,t,g, or c
gattggaagcacaagtgcatggcactgactgaatgctgttaatatttctaaaagtttctacattcagattatatgcctgattcatagtaaaatacctctaataaacactgttttatagaaaacctgacttcagtgaatatttttgtattttacatgggccagtttatatactgctatttacactattatttcctatagctacatgttctttgtaccttttgtagttttatttgtattactagattcataccttgatggtaacgctctatctggttttgggtgtttttcatgttttagcatttgtataaagaaactggtccatgtaaatactttccatgttttttcttcaaatgtttaaaccactagttgatgtatggtatctttagatatttgcctgtctgtttgctcaaaattgcttctaaaacaataaagattcttttatttcttaaggcaaaaaanannaann

SEQ ID NO: 1780 - DNA, 657 bp, Homo sapiens
  misc_feature (3)..(3): n equals a,t,g, or c
  misc_feature (269)..(269): n equals a,t,g, or c
  misc_feature (282)..(282): n equals a,t,g, or c
  misc_feature (446)..(446): n equals a,t,g, or c
  misc_feature (449)..(449): n equals a,t,g, or c
  misc_feature (458)..(458): n equals a,t,g, or c
  misc_feature (550)..(550): n equals a,t,g, or c
  misc_feature (579)..(579): n equals a,t,g, or c
  misc_feature (612)..(612): n equals a,t,g, or c
  misc_feature (623)..(623): n equals a,t,g, or c
  misc_feature (650)..(650): n equals a,t,g, or c
  misc_feature (652)..(652): n equals a,t,g, or c
ggntctggtaaagggaaagctcccaaagcagcctgtcatcgtgaaggccaaattcttcagcagaagagctgaggagaagattaagagtgttgggggggcctgtgtcctggtggcttgaagccacatggagggagtttcattaaatgctaactacttttaaaaaaaaaaaaaaagggcggccgctctagaggatccaagcttacgtacgcgtgcatgcgacgtcatagctcttctatagtgtcacctaaattcaattcactggccgtcgntttacaacgtcgngactgggaaaaccctggcgttacccaacttaatcgccttgcagcacatccccctttcgccagctggcgtaatagcgaagaggcccgcaccgatcgcccttcccaacagttgcgcagcctgaatggcgaatgggacgcgccctgtagcggcgcattaagcgcggnggntgtggtggntacgcgcagcgtgaccgctacacttgccagcgcctacgccgttctttcgtttcttccttctttctcgcacgttcgccggtttcccgcaagtntaaatcgggctcccttaaggttcgattantgttacggactcgacccaaaactgataggtgangttacgatggncatgcctgaaacgtttgcttgcgtgancngtcta

SEQ ID NO: 1781 - DNA, 604 bp, Homo sapiens
  misc_feature (28)..(28): n equals a,t,g, or c
  misc_feature (69)..(69): n equals a,t,g, or c
  misc_feature (79)..(79): n equals a,t,g, or c
  misc_feature (101)..(101): n equals a,t,g, or c
  misc_feature (109)..(109): n equals a,t,g, or c
  misc_feature (132)..(132): n equals a,t,g, or c
  misc_feature (389)..(389): n equals a,t,g, or c
  misc_feature (391)..(392): n equals a,t,g, or c
  misc_feature (396)..(396): n equals a,t,g, or c
  misc_feature (400)..(402): n equals a,t,g, or c
  misc_feature (404)..(405): n equals a,t,g, or c
  misc_feature (411)..(411): n equals a,t,g, or c
  misc_feature (413)..(413): n equals a,t,g, or c
  misc_feature (416)..(419): n equals a,t,g, or c
  misc_feature (421)..(421): n equals a,t,g, or c
  misc_feature (424)..(424): n equals a,t,g, or c
  misc_feature (426)..(427): n equals a,t,g, or c
  misc_feature (437)..(437): n equals a,t,g, or c
  misc_feature (445)..(445): n equals a,t,g, or c
  misc_feature (471)..(471): n equals a,t,g, or c
  misc_feature (490)..(490): n equals a,t,g, or c
  misc_feature (493)..(493): n equals a,t,g, or c
  misc_feature (529)..(529): n equals a,t,g, or c
  misc_feature (542)..(542): n equals a,t,g, or c
  misc_feature (570)..(570): n equals a,t,g, or c
  misc_feature (577)..(577): n equals a,t,g, or c
  misc_feature (580)..(580): n equals a,t,g, or c
aaactcgggaaagtttcccggtaccggnccggaattcccgggtcgacccacgcgtccggcagattcctngaatcctctntccaggtttaaataaggcaggnaagttccnttccctgctcacacacaacgaanacatggtggccaaagtggatgaggtgaagtccacaatcaagttccaaatgaagaaggtgttatgtctggctgtagctgttggtcacgtgaagatgacagacgatgagcttgtgtataacattcacctggctgtcaacttcttggtgtcattgctcaagaaaaactggcagaatgtccgggccttatatatcaagagcaccatgggcaagccccagcgcctatattaaggcacatttgaataaattctattaccagtnannaaanggannngnnaaaatncnaannnnanctnannaaaaaggggnggccggtntagaggatccaagcttacgtacgcgngcatgcgacgtcatagctnttntataggggcacctaaattcaatttactggccggcgntttacaacgtcgngactgggaaaaccctggggttacccaancttaatngcnttgaagaaaatcccccttttggca

SEQ ID NO: 1782 - DNA, 420 bp, Homo sapiens
  misc_feature (29)..(29): n equals a,t,g, or c
  misc_feature (39)..(39): n equals a,t,g, or c
  misc_feature (296)..(296): n equals a,t,g, or c
  misc_feature (360)..(360): n equals a,t,g, or c
  misc_feature (395)..(395): n equals a,t,g, or c
ggccgccctttttttttttttttggattnttctcaggtntttatttgctctctcaacttctaggaattgacttatttaattaatccatcaacgcttcatagcaaatatttgagaacacaaatttatattcaggttcttaacttcattagggaagtaagaagttgcagctcagtgcaccatgaatttgagacagagatggagacatccagccccacctctctggaacaggaaagatgatcggggagggaacacaggtcagtgtggggacagggccggacgcgtgggtcgaccccggnattccgaccggtaccttgcaggcgtaccagctttccctatagtgagtcgtattagagcttgcgnaatcatggtcatagctgtttcctgtgtgaaattgntatccgctcacaattccacacaaca

SEQ ID NO: 1783 - DNA, 474 bp, Homo sapiens
  misc_feature (302)..(302): n equals a,t,g, or c
  misc_feature (342)..(342): n equals a,t,g, or c
  misc_feature (359)..(359): n equals a,t,g, or c
  misc_feature (416)..(416): n equals a,t,g, or c
  misc_feature (428)..(428): n equals a,t,g, or c
  misc_feature (441)..(441): n equals a,t,g, or c
  misc_feature (461)..(461): n equals a,t,g, or c
  misc_feature (471)..(471): n equals a,t,g, or c
gcttggttcttggtattgacttgcctttttttgttgttttttaaaagcacccattttgttcaatgcttctgttctattactcaaaatgtagccaaaatagaagggaatcaattactagtgtattattttgaaagcttcaaacagaaattgtgaaatgttatttctgctcatattcttagtgttttctcttggtagaatcataatgtttagcctttatgatatttaaaacccattttgagtgttaggtttatttttatgatactctgccggtaacttttaagtcatcaggctaggatatgaanagtagttttttaagtttatggtttaaaagtgaaatattgngaatctttcatcataantctcatcaatatccctcaaaatttttaaatggtaatgctttaatatttaagaaaaantttatccaaagnttaaaaaaaatanaaacctggttaaaaaaaaanaaaaaaaaanggg

SEQ ID NO: 1784 - DNA, 567 bp, Homo sapiens
  misc_feature (1)..(1): n equals a,t,g, or c
  misc_feature (69)..(69): n equals a,t,g, or c
  misc_feature (123)..(123): n equals a,t,g, or c
  misc_feature (192)..(192): n equals a,t,g, or c
  misc_feature (486)..(486): n equals a,t,g, or c
  misc_feature (543)..(543): n equals a,t,g, or c
  misc_feature (545)..(545): n equals a,t,g, or c
ncctaaacaagcaagatctgctcgctgagaaagtccttgctgggaaatcgaagattgaggactactttncagaatttgctcgctacactactcctgaggatgctactcccgagcccggagagnacccacgcgtgacccgggccaagtacttcattcgagatgagtttctgaggatcagcactgccagtgganatgggcgtcactactgctaccctcatttcacctgcgctgtggacactgagaacatccgccgtgtgttcaacgactgccgtgacatcattcagcgcatgcaccttcgtcagtacgagctgctctaagaagggaacccccaaatttaattaaagccttaagcacaattaattaaaagtgaaacgtaattgtacaagcagttaatcacccaccatagggcatgattaacaaagcaacctttcccttcccccgagtgattttgcgaaacccccttttcccttcagcttgcttagatgntccaaatttagaaagcttaaggcggcctacagaaaaaggaaaaaaggccacaaaagntncctctcactttcagtaaaaata

SEQ ID NO: 1785 - DNA, 551 bp, Homo sapiens
  misc_feature (402)..(402): n equals a,t,g, or c
  misc_feature (450)..(450): n equals a,t,g, or c
  misc_feature (455)..(455): n equals a,t,g, or c
  misc_feature (471)..(471): n equals a,t,g, or c
gcccaagtgctattgcaataacagttgatactcattttaggtaccaaaccttttgagttcaactgatcaaaccaaaggaaaagtgttgctagagaaaattggggaaaaggtgaaaaagaaaaaatggtagtaattgagcagaaaaaaattaatttatatatgtattgattggcaaccagatttatctaagtagaactgaattggctaggaaaaaagaaaaactgcatgttaatcattttcctaagctgtccttttgaggcttagtcagtttattgggaaaatgtttaggattattccttgctattagtactcattttatgtatgttacccttcagtaagttctccccattttagttttctaggactgaaaggattcttttctacattatacatgtgtgttgncatatttggcttttgctatatactttaacttcattggtaaatttttgnattgnatagtttctttggtgnatcttaaaacctatttttgaaaaacaaacttggcttgataatcatttgggcagcttgggtaagtacccaacttacttttc

SEQ ID NO: 1786 - DNA, 278 bp, Homo sapiens
  misc_feature (274)..(278): n equals a,t,g, or c
gcactcactcttaacattttggtatattttttctctctgcacattttttatccagctgactttattttgtctcctgaaatcttcatttttaaattatagcttcagcatttaagaaaatgtgtctaacaaagtcttcgcaagcatacatttttcccatagttagtatacttagaatttatttgtcaagcaattttgaagggctttcactatgaaaaattagctatgatctttagagaagatgtttatatacaaaagtatatatgaaaaaaaaaannnnn

SEQ ID NO: 1787 - DNA, 414 bp, Homo sapiens
  misc_feature (15)..(15): n equals a,t,g, or c
  misc_feature (27)..(27): n equals a,t,g, or c
  misc_feature (31)..(31): n equals a,t,g, or c
  misc_feature (43)..(43): n equals a,t,g, or c
  misc_feature (91)..(91): n equals a,t,g, or c
  misc_feature (300)..(301): n equals a,t,g, or c
  misc_feature (338)..(338): n equals a,t,g, or c
  misc_feature (396)..(396): n equals a,t,g, or c
cacgcacctgctcantccagggttagntttnacgcccgcagcnaccggtccggaattcccgggtcgacccacgcgtccgccaagccccatnaataaagcccctgttcacgctgcactggtgcatgaaggtgaagtaaggaggcagctactccctccacaaataagaattcgtgcagcagcagttcactccttaggaaaatgaagagtatttttaaggagatggtatctccccagtcaagggcaagtttacagagatgaaaccgcgatcccaccatcactcaatgagccagaagccaatgnncgatgtactgatatgacttgtgtggaaagatctttgngaggattaggaattaggttaaaagaaattaagaaccatcttcaagcaaaaattaaacnttatttctgcttaaaaaa

SEQ ID NO: 1788 - DNA, 447 bp, Homo sapiens
  misc_feature (314)..(314): n equals a,t,g, or c
  misc_feature (368)..(368): n equals a,t,g, or c
  misc_feature (394)..(394): n equals a,t,g, or c
  misc_feature (447)..(447): n equals a,t,g, or c
ggcaagatgctggaattacttcagactcaatgatgaagaacttcttctttgtgccttcttgcattcagctgagccaagaagacagcttttccgctgaagcttaaacaggcattaacgcttctttagatctgaagttgcaggttaagcttgtctggtcaacattccagtgtggaaaaataatttaaacaatcttattctcttaattcttttggcaacaaattagatagttttggaccagacaaatcagtttcatctataattcattggggataatgggagatttagataatggatccagatttaaacctaccagnttgcctaccccttaagcggttaaaataaaatatgcaacaaaatggatgacttantggagatggaagcccattaattgggntccccattaaatcgttacataccagaacacaggttttatactaaggatttggn

SEQ ID NO: 1789 - DNA, 390 bp, Homo sapiens
  misc_feature (220)..(220): n equals a,t,g, or c
  misc_feature (288)..(288): n equals a,t,g, or c
  misc_feature (290)..(290): n equals a,t,g, or c
  misc_feature (353)..(353): n equals a,t,g, or c
  misc_feature (387)..(390): n equals a,t,g, or c
gctcctttccctttcttctctgaaaaaaactaatttaaatttgcttttcttttttttaactgagttgaattgagattgatgtgttttcactggatttttatctctctcaacttcctgcacttaacaatatgaaatagaaacttttgtctttactgagatgaggatatgtttgagatgcacagttggataatgtgggaaaatgacatctaagctttactgnacatggtggtcagatgttgaattaacacttttcacttggtcttatactgaatgccgactctgctctgngntagaagatatgaaatgggtggttgatactggttgagacattatggagagatttaattatttgnaataaaagatttgctgcagtctgaaaaaaaaaannnn

SEQ ID NO: 1790 - DNA, 445 bp, Homo sapiens
  misc_feature (237)..(237): n equals a,t,g, or c
ggagaattcgtccgctcccgaggctgagcagggcggggctgagtaaatgccggcttaccatctctaccatcatccggtttagtcatccaacaagaagaaatatgaaattccagcaataagaaatgaacaaaagattggagctgaagacctaaagtgcttgctttttgcccgttgaccagataaatagaactatctgcattatctatgcagcatggggtttttattatttttacctanagacgctctttttggtaataacaaacgtgttttttaaaaaagcctggtttttctcaatacgcctttaaaggtttttaaattgtttcatatctggtcaagttgagatttttaagaacttcatttttaatttgtaataaaagtttacaacttgattttttcaaaaaagtcaacaaactgcaagcacctgttaataaaggtcttaaataat

SEQ ID NO: 1791 - DNA, 797 bp, Homo sapiens
  misc_feature (3)..(3): n equals a,t,g, or c
  misc_feature (13)..(13): n equals a,t,g, or c
  misc_feature (16)..(16): n equals a,t,g, or c
  misc_feature (20)..(20): n equals a,t,g, or c
  misc_feature (30)..(30): n equals a,t,g, or c
  misc_feature (398)..(398): n equals a,t,g, or c
  misc_feature (411)..(411): n equals a,t,g, or c
  misc_feature (426)..(426): n equals a,t,g, or c
  misc_feature (440)..(440): n equals a,t,g, or c
  misc_feature (446)..(446): n equals a,t,g, or c
  misc_feature (464)..(464): n equals a,t,g, or c
  misc_feature (492)..(492): n equals a,t,g, or c
  misc_feature (578)..(578): n equals a,t,g, or c
  misc_feature (603)..(603): n equals a,t,g, or c
  misc_feature (639)..(639): n equals a,t,g, or c
  misc_feature (677)..(677): n equals a,t,g, or c
  misc_feature (693)..(693): n equals a,t,g, or c
  misc_feature (711)..(711): n equals a,t,g, or c
  misc_feature (771)..(772): n equals a,t,g, or c
  misc_feature (793)..(793): n equals a,t,g, or c
tgnctcacctatngantgcngctacgcctncaggtaccggtccggaattcccgggtcgacccacgcgtccgatcatattctagtatgttctgaaatatctttaagactgatcttaaaaactaacttctaagatgatttcatcttctcatagtatagagtttactttgtacacgtttgaaaccaactactgtagaagatgaggaatctattgtaattttttgctttattttcatctgccagtggacttatttgaaattttcactttagtcaaattattttttgtattagtttttgatgcagacataaaaatagcaatcattttaaattgtcaaaatttccagattactggtaaaaattatttgaaaacaaacttatgggtaataaagggtagtcagaancctatacattaangggaggtaccatacnggataatatgtagnaaaaangtatgcttgatatttctnactgggtaatttttctgctgattccagntgaccaaaacaatattaagaatgcatctttataaatgggtgctaattgataatggaaataatttagtaatggactatacaggatgntaataatgaagccatatggttatgnctggatttaaaaattttaaacaatcatttactatgncatttttctttaccttgaagaacataaactggtatttnacttttacaaatcagnaggatattattatgggangaaatattccattggaatattgggtggaacaagggaaaggggaaagggttttaaggtttnnataatgggaaataaaattaantttg

SEQ ID NO: 1792 - DNA, 298 bp, Homo sapiens
gttttaacctggaggcattccatgtctaaaatttagttagtttagttgcttagaattgaaaagtcaaccccaagactttttgccttttattactgtctaaatgcatcttatagtgtgaagtaaaatattctgcgtctttgtataactatgaaaatatttgaaatgctaacatttttatttaaggttaaagaatgagagctacttgtaaaatattaacatgccatttatcacatatactttaataaaacattgggattttacaaataaaataagatgcagccataaaaaaaaaaaaaaa

SEQ ID NO: 1793 - DNA, 613 bp, Homo sapiens
  misc_feature (15)..(15): n equals a,t,g, or c
  misc_feature (17)..(17): n equals a,t,g, or c
  misc_feature (245)..(245): n equals a,t,g, or c
  misc_feature (292)..(292): n equals a,t,g, or c
  misc_feature (295)..(295): n equals a,t,g, or c
  misc_feature (315)..(315): n equals a,t,g, or c
  misc_feature (320)..(320): n equals a,t,g, or c
  misc_feature (348)..(348): n equals a,t,g, or c
  misc_feature (377)..(377): n equals a,t,g, or c
  misc_feature (445)..(445): n equals a,t,g, or c
  misc_feature (543)..(543): n equals a,t,g, or c
  misc_feature (558)..(558): n equals a,t,g, or c
  misc_feature (585)..(585): n equals a,t,g, or c
  misc_feature (597)..(597): n equals a,t,g, or c
  misc_feature (605)..(605): n equals a,t,g, or c
gagaacagtgattantnaaaaattaaatgtaggactatgtcaaatattaagcaaactgtaataaaccaagtaaatttttttcatgatcactttttcttttcgaatagttggaaagatccaaataatgacttcagaaaaaaacttgaaagtaacagcagtgcctacactacttaagtatggaacagtaagtatctttaaatatgctgggcctgtaattcactgtcagaactcttttaacttgctgnggatccagatttgaaaagatcttgacatttcatctcaattccattgntgntcagagtgctgctgaaagtncattnctatggcaaatccaataactggtaatgnaaatatctactattaggcctttttcatgntaagcactcttaaaaaaccagaaagtaggttgactcataattccttaaacatttgcatcaacagttgntttctggttaattcataattctggttaaaaagtaagggcatctcttctagttcagtcatgcccctgggatcctaaattaaagagttgaggggaagaanaggcactgggcttgntgctcctggtttagctggggagcttcnggaatttggggnttaagctntgagccaa

SEQ ID NO: 1794 - DNA, 603 bp, Homo sapiens
  misc_feature (16)..(16): n equals a,t,g, or c
  misc_feature (304)..(304): n equals a,t,g, or c
  misc_feature (352)..(352): n equals a,t,g, or c
  misc_feature (377)..(377): n equals a,t,g, or c
  misc_feature (390)..(390): n equals a,t,g, or c
  misc_feature (437)..(437): n equals a,t,g, or c
  misc_feature (536)..(536): n equals a,t,g, or c
  misc_feature (557)..(557): n equals a,t,g, or c
  misc_feature (587)..(587): n equals a,t,g, or c
  misc_feature (599)..(600): n equals a,t,g, or c
gatttatttgtggtcncccagggttcagagcaagaagtcttgctttatacaaatgtatccataaaatatcagagcttgttgggcatgaacatcaaacttttgttccactaatatggctctgtttggaaaaaactgcaaatcagaaagaatgatttgcagaaagaaagaaaaactatggtgtaatttaaactctgggcagcctctgaatgaaatgctactttctttagaaatataatagctgccttagacattatgaggtatacaactagtatttaagataccatttaatatgccccgtaaatgncttcagtgtcttcaggggaagttgggatctcaaaagatttggttcaanatccaaacaaatacacattctgggntttagctcagtgntttctaaaaaaagaaactgccacacagcaaaaaattggttactttgntggacaaaccaaatcagttctcaaaaaatgacccggtgcttataaaaaggtataaatatcgagtagcttttaaacaaaccacctgaccaagaagggaantgagcttggcttagaattacnttggatgccagtttggaacactgcttatgnccaaatggggcnnaaa

SEQ ID NO: 1795 - DNA, 387 bp, Homo sapiens
  misc_feature (1)..(1): n equals a,t,g, or c
  misc_feature (8)..(8): n equals a,t,g, or c
  misc_feature (23)..(23): n equals a,t,g, or c
  misc_feature (47)..(47): n equals a,t,g, or c
  misc_feature (49)..(49): n equals a,t,g, or c
  misc_feature (155)..(155): n equals a,t,g, or c
  misc_feature (157)..(157): n equals a,t,g, or c
  misc_feature (231)..(231): n equals a,t,g, or c
  misc_feature (252)..(252): n equals a,t,g, or c
  misc_feature (261)..(262): n equals a,t,g, or c
  misc_feature (282)..(282): n equals a,t,g, or c
  misc_feature (346)..(346): n equals a,t,g, or c
  misc_feature (362)..(362): n equals a,t,g, or c
  misc_feature (375)..(375): n equals a,t,g, or c
  misc_feature (377)..(377): n equals a,t,g, or c
  misc_feature (381)..(381): n equals a,t,g, or c
ntgctggnacgcctgtaggtacnggtccggaattcccgggtcgaccnangcgtccgacttgctctaaacagctacttgtaccccttaagctgactttaaaagttgcatatagttacagtacgtgtataaattaaatattgtggaaaaacagtctngnatttttctgtatgtgtgtatatatatatataattatgtacttatggcaattctatctgtatttaaagatgtganaatcttgacaccaattttaanaatagctgnnagatcgaattaaagataatnctatcaagtgaaaattgatgtgtgttaagagggtacagaattatcaactgatttggtcagttgnttcaatggtggtgatncctcatgggaaanantgcngggaag

SEQ ID NO: 1796 - DNA, 392 bp, Homo sapiens
  misc_feature (38)..(38): n equals a,t,g, or c
  misc_feature (56)..(56): n equals a,t,g, or c
  misc_feature (135)..(135): n equals a,t,g, or c
  misc_feature (162)..(163): n equals a,t,g, or c
  misc_feature (174)..(174): n equals a,t,g, or c
  misc_feature (185)..(185): n equals a,t,g, or c
  misc_feature (204)..(204): n equals a,t,g, or c
  misc_feature (206)..(206): n equals a,t,g, or c
  misc_feature (263)..(263): n equals a,t,g, or c
  misc_feature (377)..(377): n equals a,t,g, or c
  misc_feature (380)..(380): n equals a,t,g, or c
  misc_feature (387)..(387): n equals a,t,g, or c
  misc_feature (390)..(390): n equals a,t,g, or c
  misc_feature (392)..(392): n equals a,t,g, or c
gaatttgtgctgtatacaaattacatggggaacataanggagtgagatccttctgngataaaatgaattcaccactctggttacccaactacagaacctcctttgatcaggccagtaggttgtgatgcaggctgnagcccccgaatgccccacacacactgnngcattgaccanaccatccgaancctgcgtccctggtgatgntntcaagcctcgcaagtggcaaatggaaatgatatggccggctgcggctgtaggagagntgtgacttaggcaggagtcgacctccttaaggaatggaaccgattcaaaggcaggctgcctgccaaaaatatctccatgaataaaggtgcctgaaatcctgctaaaaaaaaaanagnaccaagnttncn

SEQ ID NO: 1797 - DNA, 695 bp, Homo sapiens
  misc_feature (293)..(293): n equals a,t,g, or c
  misc_feature (316)..(316): n equals a,t,g, or c
  misc_feature (355)..(355): n equals a,t,g, or c
  misc_feature (568)..(568): n equals a,t,g, or c
  misc_feature (575)..(575): n equals a,t,g, or c
  misc_feature (589)..(589): n equals a,t,g, or c
  misc_feature (614)..(614): n equals a,t,g, or c
  misc_feature (634)..(634): n equals a,t,g, or c
  misc_feature (693)..(695): n equals a,t,g, or c
gaaacaattgctttacttgttgctggactagtgatcactgtcattgtcattgttggagccattcttttcgtcccaggtgaatattcattaaagaatgctactggccttggtttaattgtgacttctacagggatattaatattacttcactactatgtgtttagtacagcgattggattaacctccttcgtcattgccatattggttattcaggtgatagcctatatcctcgctgtggttggactgagtctctgtattgcggcgtgtataccaatgcatggccctcttctganttcagggttgaggatcttaactntagcaccaattacttggactaggttaatatgaaatttgngggggttcaagaggggacacctacaggtcagtttgaaagggcaagaagaagaccaagcttccaatcaagaagactatacaacctcctaggaataactgaagtgaagtgatgggactccgatttgggagagtagtaagaacgtgaaaggaatacacttggggttaagcaccatgggccttgatgaattcactggttgggggaagaaagaaaccnggaaaangtaacctgggttgncacctaatgagacccttaacgtganttggttaggttaaggttttnaattcaaagcaacttggaaatttaggttaataaaaataattattgatctaaaaaaaaannn

SEQ ID NO: 1798 - DNA, 596 bp, Homo sapiens
  misc_feature (482)..(482): n equals a,t,g, or c
  misc_feature (592)..(596): n equals a,t,g, or c
gggcccgcccgcccaccgtgggcagtgccacccgcagatgacacgcgctctccaccacccaacccaaaccatgagaatttgcaacaggggaggaaaaaagaaccaaaacttccaaggccctgctttttttcttaaaagtactttaaaaaggaaatttgtttgtattttttatttacattttatatttttgtacatattgttagggtcagccatttttaatgatctcggatgaccaaaccagccttcggagcgttctctgtcctacttctgactttacttgtggtgtgaccatgttcattataatctcaaaggagaaaaaaaaccttgtaaaaaaagcaaaaatgacaacagaaaaacaatcttattccgagcattccagtaacttttttgtgtatgtacttagctgtactataagtagttggtttgtatgagatggttaaaaaggccaaagataaaaggtttctttttttttccttttttgnctatgaagttgctggttattttttttggcctgtttgatgtatgtgtgaaacaatgttgccaacaataaacaggaattttattttgctgagttggtctaacaaaaaaaaannnnn

SEQ ID NO: 1799 - DNA, 631 bp, Homo sapiens
  misc_feature (1)..(1): n equals a,t,g, or c
  misc_feature (6)..(6): n equals a,t,g, or c
  misc_feature (10)..(10): n equals a,t,g, or c
  misc_feature (12)..(12): n equals a,t,g, or c
  misc_feature (19)..(19): n equals a,t,g, or c
  misc_feature (542)..(542): n equals a,t,g, or c
  misc_feature (617)..(617): n equals a,t,g, or c
  misc_feature (627)..(628): n equals a,t,g, or c
  misc_feature (630)..(630): n equals a,t,g, or c
nctagntggnangcctgcngtaccggtccggaattcccgggtcgacccacgcgtccgctttttattgacccacaagcagatatttgaattacttcttactttattgctccaggattctggatgggctgcatttactgtgtgaaggataaaaatcattagcctggattctgatttctataaattgccattaaaagctttttttcccctaagaactgaaatgtgctcaccagccaaaacattttaacttgtaaattttgagggcagttaaccaaacctgtgactaatcatatctcctcctaccccccatttccaaggacatttgttactcagatacttgttatactaatacttgaacttgtaccttatggtatttgctatcttttaactagtcatgatattcttatactttagttacacttttggaatttgatacaaggttgagtggggtgtgtgggtgtatgtatgagtgaaacagttctcaaaagaatgtaagaaaaaccatttttataaaattgtgactttttaaaaacataagtctttgncatttatagaattaacaagctgctcaaggtatattttatagctgtagcactgatatctgcattaataaatactgncgaaacacannana

SEQ ID NO: 1800 - DNA, 426 bp, Homo sapiens
  misc_feature (407)..(407): n equals a,t,g, or c
  misc_feature (409)..(409): n equals a,t,g, or c
  misc_feature (418)..(419): n equals a,t,g, or c
  misc_feature (423)..(423): n equals a,t,g, or c
gatcaggaccaattacaatgacagatacgatgaggtaagaggcagctttacaccaaaatactgtcattcacaaatctttctcccaaataactggctggcttaacctatgagaagttctatctgacgatcagcttggaacagccaaacagaattaacgcaactaataaccttgaaaatctcagaaaacagtaagccaagctaactgcctctttttgtcttttcagatccgccgtcactggggtggcaatgtcctgggtcctaagtctgtggctcgtatcgccaagctcgaaaaggcaaaggctaaagaacttgccactaaactgggttaaatgtacactgttgagttttctgtacataaaaataattgaaataatacaaattttccttcaaaaaaaaaaaaaaggggngnccgttttannggancca

SEQ ID NO: 1801 - DNA, 166 bp, Homo sapiens
  misc_feature (5)..(5): n equals a,t,g, or c
  misc_feature (21)..(21): n equals a,t,g, or c
  misc_feature (30)..(30): n equals a,t,g, or c
  misc_feature (103)..(103): n equals a,t,g, or c
  misc_feature (115)..(115): n equals a,t,g, or c
  misc_feature (120)..(120): n equals a,t,g, or c
  misc_feature (162)..(162): n equals a,t,g, or c
  misc_feature (164)..(164): n equals a,t,g, or c
tggcngttgctctagcccggncggatcccncgggctgcaggaattcattgacgacgacaagttaacgtttttccaatttattactgtgctgtatagctggggnggaacataggcngaatntgtaccaaccccagaacaaccactggaacttactgtctttantnaa

SEQ ID NO: 1802 - DNA, 762 bp, Homo sapiens
  misc_feature (567)..(567): n equals a,t,g, or c
  misc_feature (594)..(594): n equals a,t,g, or c
  misc_feature (597)..(597): n equals a,t,g, or c
  misc_feature (648)..(648): n equals a,t,g, or c
  misc_feature (686)..(686): n equals a,t,g, or c
  misc_feature (715)..(715): n equals a,t,g, or c
  misc_feature (744)..(744): n equals a,t,g, or c
  misc_feature (752)..(752): n equals a,t,g, or c
  misc_feature (756)..(756): n equals a,t,g, or c
ggacaggtttggttttttaattaatctcatgtgttcaaattaacataaatattacacgtcaatacactgtacatggtggtaatagactctaagcaattgccaagatgtattctatttttatgaagtgtatatatattaccttagtgtgcattttctatataatatcttgatggactcttttataaaattattttataaaaaacaatgttacactaaaatcagcctaaataaattttcacaactttttttcaaaaaaaaaaaaaaagggcggccgctctagaggatccaagcttacgtacgcgtgcatgcgacgtcatagctcttctatagtgtcacctaaattcaattcactggccgtcgttttacaacgtcgtgactgggaaaaccctggcgttacccaacttaatcgccttgcagcacatccccctttcgccagctggcgtaatagcgaagaggcccgcaccgatcgcccttcccaacagttgcgcagcctgaatggcgaatgggacgcgccctgtagcggcgcattaagcgcggcggtgtggtggttacgcgcagcgtgaccgntacacttgccagcgccctagcgcccgntcntttcgctttcttccttcctttcttcgccacggtcgccgggttttccccggnaaagcttctaaaatcgggggggcttcccttttaggggnttcccgaatttaaggggcttttaacgggnacccttggaccccccaaaaaactttgganttaagggnggangggttt

SEQ ID NO: 1803 - DNA, 762 bp, Homo sapiens
  misc_feature (10)..(10): n equals a,t,g, or c
  misc_feature (654)..(654): n equals a,t,g, or c
  misc_feature (660)..(660): n equals a,t,g, or c
  misc_feature (672)..(672): n equals a,t,g, or c
  misc_feature (681)..(681): n equals a,t,g, or c
  misc_feature (743)..(743): n equals a,t,g, or c
  misc_feature (747)..(747): n equals a,t,g, or c
ggaagcactnaaggatgagttcgatgacctttctgacctcactgctgcccagcaggagactctgagtgactgggagtctcagttcactttcaagtatcatcacgtgggcaaactgctgaaggagggggaggagcccactgtgtactcagatgaggaagaaccaaaagatgagagtgcccggaaaaatgattaaagcattcagtggaagtatatctatttttgtattttgcaaaatcatttgtaacagtccactctgtctttaaaacatagtgattacaatatttagaaagttttgagcacttgctataagttttttaattaacatcactagtgacactaataaaattaacttcttagaatgcaaaaaaaaaaaaaaaagggcggccgctctagaggatccaagcttacgtacgcgtgcatgcgacgtcatagctcttctatagtgtcacctaaattcaattcactggccgtcgttttacaacgtcgtgactgggaaaaccctggcgttacccaacttaatcgccttgcagcacatccccctttcgccagctggcgtaatagcgaagaggcccgcaccgatcgcccttcccaacagttgcgcagcctgaatggcgaatgggacgcgccctgtagcggcgcattaagcgcggcggntgtggnggttacgcgcancgggaccgntacacttgccagggccctaacgcccggtcctttcgctttcttccccttcctttctcggcacngttngccgggtttttcccc

SEQ ID NO: 1804 - DNA, 661 bp, Homo sapiens
  misc_feature (45)..(45): n equals a,t,g, or c
  misc_feature (56)..(56): n equals a,t,g, or c
  misc_feature (114)..(114): n equals a,t,g, or c
  misc_feature (578)..(578): n equals a,t,g, or c
  misc_feature (584)..(584): n equals a,t,g, or c
  misc_feature (605)..(605): n equals a,t,g, or c
  misc_feature (625)..(625): n equals a,t,g, or c
  misc_feature (632)..(632): n equals a,t,g, or c
ccggcccggaattcccgggtcgacccacgcgtccgccagcagttntactggagttncccgcgaaaattcggccagggttctcgctcttgtcgtgtctgttcaaaccggcacggnctgatccggaaatatggcctcaatatgtgccgccagtgtttccgtcagtacgcgaaggatatcggtttcattaagttggactaaatgctcttccttcagaggattatccggggcatctactcaatgaaaaaccatgataattctttgtatataaaataaacatttgaaaaaaccaaaaaaaaaaaaaaagggcggccgctctagaggatccaagcttacgtacgcgtgcatgcgacgtcatagctcttctatagtgtcacctaaattcaattcactggccgtcgttttacaacgtcgtgactgggaaaaccctggcgttacccaacttaatcgccttgcagcacatccccctttcgccagctggcgtaatagcgaagaggcccgcaccgatcgcccttcccaacagttgcgcagcctgaatggcgaatgggacgcgccctgtagcggcgcattaagcgcggcgntgtggnggttacgcgcagcgtgaccgntacacttgccagcgccctancgcccgntcctttcgctttctttcccttcctttctt

SEQ ID NO: 1805 - DNA, 821 bp, Homo sapiens
  misc_feature (3)..(3): n equals a,t,g, or c
  misc_feature (52)..(52): n equals a,t,g, or c
  misc_feature (122)..(122): n equals a,t,g, or c
  misc_feature (667)..(669): n equals a,t,g, or c
  misc_feature (683)..(683): n equals a,t,g, or c
  misc_feature (705)..(705): n equals a,t,g, or c
  misc_feature (730)..(730): n equals a,t,g, or c
  misc_feature (732)..(732): n equals a,t,g, or c
  misc_feature (770)..(770): n equals a,t,g, or c
  misc_feature (781)..(781): n equals a,t,g, or c
  misc_feature (790)..(790): n equals a,t,g, or c
  misc_feature (821)..(821): n equals a,t,g, or c
ccnggtaccggcccggaattcccgggtcgacccacgcgtccgctggtatttnctttactatttgatagaagtagcatgttgctgccagaatacaagcattgcttttggcaaattaaagtgcntgtcatttcttaatacactagaaaggggaaataaattaaagtacacaagtccaagtctaaaactttagtacttttccatgcagatttgtgcacatgtgagagggtgtccagtttgtctagtgattgttatttagagagttggaccactattgtgtgttgctaatcattgactgtagtcccaaaaaagccttgtgaaaatgttatgccctatgtaacagcagagtaacataaaataaaagtacattttataaaccaaaaaaaaaaaaaaagggcggccgctctagaggatccaagcttacgtacgcgtgcatgcgacgtcatagctcttctatagtgtcacctaaattcaattcactggccgtcgttttacaacgtcgtgactgggaaaaccctggcgttacccaacttaatcgccttgcagcacatccccctttcgccagctggcgtaatagcgaagaggcccgcaccgatcgcccttcccaacagttgcgcagcctgaatggcgaatgggacgcgccctgtagcggcgcattaagcgcggcggnnngtgggggttacccncagcgggacccggtacacttgncagcgccctaacgcccgctcctttngntttcttccctttccttttctcggccacggtcggccggnttttcccccgncaaggcttntaaaatcgggggggcttccccttttaagggn

SEQ ID NO: 1806 - DNA, 606 bp, Homo sapiens
  misc_feature (2)..(2): n equals a,t,g, or c
  misc_feature (10)..(11): n equals a,t,g, or c
  misc_feature (17)..(17): n equals a,t,g, or c
  misc_feature (75)..(75): n equals a,t,g, or c
  misc_feature (551)..(551): n equals a,t,g, or c
  misc_feature (562)..(562): n equals a,t,g, or c
  misc_feature (572)..(572): n equals a,t,g, or c
  misc_feature (600)..(601): n equals a,t,g, or c
tnactggggnnatggcncaaggtacccggtccggaattcccgggtcgacccacgcgtccgggcatgtttattcanttcttatctttatattccagtaagttattttgctctcactgttttaacaaaaaaaaaaaaaaagggcggccgctctagaggatccaagcttacgtacgcgtgcatgcgacgtcatagctcttctatagtgtcacctaaattcaattcactggccgtcgttttacaacgtcgtgactgggaaaaccctggcgttacccaacttaatcgccttgcagcacatccccctttcgccagctggcgtaatagcgaagaggcccgcaccgatcgcccttcccaacagttgcgcagcctgaatggcgaatgggacgcgccctgtagcggcgcattaagcgcggcgggtgtggtggttacgcgcagcgtgaccgctacacttgccagcgccctagcgcccgctcctttcgctttcttcccttcctttctcgccacgttcgccggctttccccggcaagctctaaatcgggggctccctttagggntccgatttagngctttacggnacctcgaccccaaaaaacttgattaggnngatgg

SEQ ID NO: 1807 - DNA, 508 bp, Homo sapiens
  misc_feature (15)..(15): n equals a,t,g, or c
  misc_feature (18)..(19): n equals a,t,g, or c
  misc_feature (56)..(56): n equals a,t,g, or c
  misc_feature (65)..(65): n equals a,t,g, or c
  misc_feature (198)..(198): n equals a,t,g, or c
  misc_feature (200)..(200): n equals a,t,g, or c
  misc_feature (290)..(290): n equals a,t,g, or c
  misc_feature (312)..(312): n equals a,t,g, or c
  misc_feature (316)..(316): n equals a,t,g, or c
  misc_feature (323)..(323): n equals a,t,g, or c
  misc_feature (363)..(363): n equals a,t,g, or c
  misc_feature (376)..(376): n equals a,t,g, or c
  misc_feature (380)..(380): n equals a,t,g, or c
  misc_feature (384)..(384): n equals a,t,g, or c
  misc_feature (387)..(389): n equals a,t,g, or c
  misc_feature (396)..(396): n equals a,t,g, or c
  misc_feature (407)..(407): n equals a,t,g, or c
  misc_feature (450)..(450): n equals a,t,g, or c
  misc_feature (489)..(489): n equals a,t,g, or c
  misc_feature (500)..(500): n equals a,t,g, or c
  misc_feature (502)..(502): n equals a,t,g, or c
  misc_feature (508)..(508): n equals a,t,g, or c
atcctcgggaaaganccnntccggaattcccgggtcgacccacgcgtccgcttttngcttcgttntggggctcatcatctggggagtgggcatcttcatgcacaggaggagcaagaaagttcaacgaggatctgcataaacagggttcctgagctcactgaaaagactattgcgccttaggaaaagcatttgctgtgntncggtagcatctggctccaggacagaccttcaacttccaaattggatactgctgccaagaaagttgctctgaagtcagcatctatcattcngctctttgattcaaagcactgntatntcactgngcctccaaccatgctcccttcttcttagcaccacaaatantcaaaacccactnaccncaanaannngggcgcncgctctagagnatccaagcttacgtacgcgtgcatgcgacgccatagctcttantatagtgtcacctaaattcaatccaactggccgtcgctntacaacgtccnanactgcn

SEQ ID NO: 1808 - DNA, 212 bp, Homo sapiens
  misc_feature (11)..(11): n equals a,t,g, or c
ggcggctccgngctgtgtcctaaatgcaaagcacacctcggccgaggcctgcgccctgacatgctaacctctctgaactgcaacactggattgttcttttttaagactcaatcatgacttctttactaacactggctagctatattatcttatatactaatatcatgttttaaaaatataaaatagaaattaagaatctaaaaaaaaaaaaa

SEQ ID NO: 1809 - DNA, 741 bp, Homo sapiens
  misc_feature (575)..(575): n equals a,t,g, or c
  misc_feature (592)..(592): n equals a,t,g, or c
  misc_feature (675)..(675): n equals a,t,g, or c
  misc_feature (683)..(683): n equals a,t,g, or c
  misc_feature (691)..(691): n equals a,t,g, or c
  misc_feature (704)..(704): n equals a,t,g, or c
  misc_feature (726)..(726): n equals a,t,g, or c
gcacaacaggcactggttcagaagcgccattacctttttgatgtgcaaaggaataacattgctatggctttggaagttacttaccgggaacgactgtatagagtatataaggaagtaaagaatcgcctggactatcatatatctgtgcagaacatgatgcgtcgaaaggaacaagaacacatgataaattgggtggagaagcacgtggtgcaaagcatctccacacagcaggaaaaggagacaattgccaagtgcattgcggacctaaagctgctggcaaagaaggctcaagcacagccagttatgtaaatgtatctatcccaattgagacagctagaaacagttgactgactaaatggaaactagtctatttgacaaagtctttctgtgttggtgtctactgaagttatagtttacccttcctaaaaatgaaaagtttgtttcatatagtgagagaacgaaatctctatcggccagtcagatgtttctcatccttcttgctctgcctttgagttgtccgtgatcacttctgaataagcaagtttgcctttataaaaacttgctgcctgactaangattaacaggttatagnttaaatttggaattaattctaccatcttgcaataaaggggccaattgaatggaaaccagggttttttcaagttggataattcntttgaaanacctcaantttttgcaaaaangggtaaaaaattttaaggatgncatttgaaccttccc

SEQ ID NO: 1810 - DNA, 452 bp, Homo sapiens
  misc_feature (451)..(452): n equals a,t,g, or c
ttttttttaacgttttaattactatagtgttatgtagagatttgattgagcagctaatgtttctgaactttacttactaattttcagtgtccttaagggttctgtagtgttatcaaagcaaaaagaaaatgctgcataaaaataccaaacttcagcaactgttaatactcagatcatatacctcttaataaatagcatcttatgctaattagccctgctaaactatgtacagaggaaactgttcaagtattggatttgaaagtaagtgacttatgtttaacagaactaatgatgtattgaaacactgtattatgaaaagctaaattatacatcattgtaactatgtagaaagtgtagactaatgtataatcaaaatgctaaggatttttatatggccttgtatgaggggagtttgaatgttaataaacatgttttccactttaaaaaaaann

SEQ ID NO: 1811 - DNA, 578 bp, Homo sapiens
  misc_feature (7)..(7): n equals a,t,g, or c
  misc_feature (9)..(9): n equals a,t,g, or c
  misc_feature (15)..(15): n equals a,t,g, or c
  misc_feature (29)..(29): n equals a,t,g, or c
aagggcnanagctcnagtttaaatttggnacgcctgccggtaccggtccggaattcccgggtcgacccacgcgtccgtgatcaaacaccagcagctgtcagacctgcacaagcaaaacctggaaatccaccggaagataaaacagtctgagcaggagctagcctatctggaaaggagagaacgagagggaaagtttaaaggaagaggaaatgatcgcagggaaaagctccagtcttttgactctccagaaaggaaacggattaagtactccagggaaactgacagtgatcgtaaacttgttgataaagaagatatcgacactagcagcaaaggaggctgtgtccaacaggctactggctggaggaaagggacaggcctgggatatggccatcctggattggcttcatcagaggaggctgaaggccggatgaggggccccagtgttggagcctcaggaagaaccagcaaaagacagtccaacgagacttaccgagatgctgttcgaagagtcatgtttgctcgatataaagaactcgattaagaaaggagacaagttccatgggatacaacctccctca

SEQ ID NO: 1812 - DNA, 372 bp, Homo sapiens
  misc_feature (368)..(372): n equals a,t,g, or c
ggttaggtctgattcatgtgaagaagatgttgcaaaggatttatttcacaaattttaaaggagatatgagtaaaagtttttatcttttcttgactttttctcctgaacacttatgtcttagcaagtggtcaacatgaggatttgaacgcctaattgttggtaaatggttgaggcatgacaaaaatattaatatccactgtttaccatcatgttatttgaaacaaaagtgaccatgtatactatcttgcttgaagaagtctttgacagaaaaagcaatatcatgtcatttataaattttcttggtctaaagaaagcagttatatatatatataaattatgtaaataaaagttattttatatcaaaaaannnnn

SEQ ID NO: 1813 - DNA, 497 bp, Homo sapiens
  misc_feature (373)..(373): n equals a,t,g, or c
  misc_feature (445)..(445): n equals a,t,g, or c
  misc_feature (488)..(488): n equals a,t,g, or c
  misc_feature (495)..(497): n equals a,t,g, or c
gcatttttaatccccagaagaaagtgctggaaatagcttctatatagtcagcagttcacctggagaaagatcttaattccttgttgttttgactaggaatatcaatatttggtataaaataactagaatagtttattaccttttccctcatgaaattttaaatatatgcaaatatatatatcattagattcctgtggtgaataataatttcttcagattctaaaacaggtgtctagtgactgcttaattgtttccaagttgcatcaaagatgaattggtaaataatggaaatgagtagtgatatgaaaatggttatgtaactacatattacttgtttctggtaatcaagtcttattttttaaaagcctattgnttttcagaattgagatatttaaaacttggtataacttcttcctaaaaatagaagagaagagggaggactggngtgttacaaaaatttttttaaataaagaatcagtgtcactaanaaaaaannn

SEQ ID NO: 1814 - DNA, 413 bp, Homo sapiens
  misc_feature (149)..(149): n equals a,t,g, or c
  misc_feature (332)..(332): n equals a,t,g, or c
  misc_feature (354)..(354): n equals a,t,g, or c
  misc_feature (384)..(384): n equals a,t,g, or c
  misc_feature (389)..(389): n equals a,t,g, or c
  misc_feature (402)..(402): n equals a,t,g, or c
  misc_feature (408)..(408): n equals a,t,g, or c
  misc_feature (411)..(411): n equals a,t,g, or c
gatttctttctggttattataaacagaaaatctttcctcttctcattaccagtaaaggctcttggtatctttctgttggaatgatttctatgaacttgtcttattttaatggtgggttttttttctggtaagatttagacctaaatcgnatcatgccaacttgggactttgagactattcatcaagaatgaggatatagtagccatgacatagcttgagctatagcctttaattccttactttggctatgggaggagggcgaagtttgaaaaagttcttgactttcttgtaacctgggaaaagccatgaccttgtgcccgattctttcaaantgctttgggcaataaataatgngggggggtatctgaaaaaaaaaaaaaaaanatttntttataaaaaaangggggnccntt

SEQ ID NO: 1815 - DNA, 762 bp, Homo sapiens
  misc_feature (25)..(25): n equals a,t,g, or c
  misc_feature (415)..(415): n equals a,t,g, or c
  misc_feature (425)..(426): n equals a,t,g, or c
  misc_feature (430)..(430): n equals a,t,g, or c
  misc_feature (432)..(432): n equals a,t,g, or c
  misc_feature (434)..(435): n equals a,t,g, or c
  misc_feature (439)..(440): n equals a,t,g, or c
  misc_feature (442)..(442): n equals a,t,g, or c
  misc_feature (485)..(485): n equals a,t,g, or c
  misc_feature (507)..(507): n equals a,t,g, or c
  misc_feature (516)..(516): n equals a,t,g, or c
  misc_feature (526)..(526): n equals a,t,g, or c
  misc_feature (557)..(557): n equals a,t,g, or c
  misc_feature (566)..(566): n equals a,t,g, or c
  misc_feature (574)..(574): n equals a,t,g, or c
  misc_feature (611)..(611): n equals a,t,g, or c
  misc_feature (628)..(628): n equals a,t,g, or c
  misc_feature (631)..(631): n equals a,t,g, or c
  misc_feature (635)..(635): n equals a,t,g, or c
  misc_feature (641)..(641): n equals a,t,g, or c
  misc_feature (652)..(652): n equals a,t,g, or c
  misc_feature (658)..(658): n equals a,t,g, or c
  misc_feature (666)..(666): n equals a,t,g, or c
  misc_feature (672)..(673): n equals a,t,g, or c
  misc_feature (699)..(699): n equals a,t,g, or c
  misc_feature (721)..(721): n equals a,t,g, or c
  misc_feature (723)..(723): n equals a,t,g, or c
  misc_feature (731)..(731): n equals a,t,g, or c
  misc_feature (733)..(733): n equals a,t,g, or c
  misc_feature (754)..(754): n equals a,t,g, or c
gtggctcctgtggaggcctgctggnaacgggacttctaaaaggaactatgtctggaaggctgtggtccaaggccatttttgctggctataagcggggtctccggaaccaaagggagcacacagctcttcttaaaattgaaggtgtttacgcccgagatgaaacagaattctatttgggcaagagatgcgcttatgtatataaagcaaagaacaacacagtcactcctggcggcaaaccaaacaaaaccagagtcatctggggaaaagtaactcgggcccatggaaacagtggcatggttcgtgccaaattccgaagcaatcttcctgctaaggccattggacacagaatccgagtgatgctgtacccctcaaggatttaaactaacgaaaaatcaataaataaatgtggatttgngctcttgtcnnaaancncnnaacnnancaaagggcggcccggtctaaaggatccaagcttacgtacgcgngcatgcgacggcataacttttntataggggncacctaaaantcaattcactgggccgcggtttacaacggcngggctgggnaaaacctnggggtaacccacttaaatcggcttggagacaatcccnttttggcaggtgggggnaanacgnaaaagnccggaaccgancggccntttccaanaattgnncaaacctgaatgggaaaagggaaccnccccttaaaggggcctttaaangncggcgggngnggggggtatccccaaaggganccgttaaa

SEQ ID NO: 1816 - DNA, 778 bp, Homo sapiens
  misc_feature (25)..(25): n equals a,t,g, or c
  misc_feature (42)..(42): n equals a,t,g, or c
  misc_feature (536)..(536): n equals a,t,g, or c
  misc_feature (540)..(540): n equals a,t,g, or c
  misc_feature (569)..(569): n equals a,t,g, or c
  misc_feature (600)..(600): n equals a,t,g, or c
  misc_feature (605)..(605): n equals a,t,g, or c
  misc_feature (612)..(612): n equals a,t,g, or c
  misc_feature (614)..(614): n equals a,t,g, or c
  misc_feature (623)..(623): n equals a,t,g, or c
  misc_feature (625)..(625): n equals a,t,g, or c
  misc_feature (631)..(631): n equals a,t,g, or c
  misc_feature (637)..(637): n equals a,t,g, or c
  misc_feature (653)..(653): n equals a,t,g, or c
  misc_feature (655)..(655): n equals a,t,g, or c
  misc_feature (662)..(662): n equals a,t,g, or c
  misc_feature (665)..(665): n equals a,t,g, or c
  misc_feature (678)..(678): n equals a,t,g, or c
  misc_feature (684)..(684): n equals a,t,g, or c
  misc_feature (695)..(695): n equals a,t,g, or c
  misc_feature (701)..(701): n equals a,t,g, or c
  misc_feature (705)..(705): n equals a,t,g, or c
  misc_feature (710)..(710): n equals a,t,g, or c
  misc_feature (714)..(714): n equals a,t,g, or c
  misc_feature (717)..(717): n equals a,t,g, or c
  misc_feature (725)..(725): n equals a,t,g, or c
  misc_feature (757)..(757): n equals a,t,g, or c
ggcagcaggcgcagcccagcctcgnttgcagaacgacgccgncgagttcgtggacctgtacgtgccgcggaaatgctccgctagcaatcgcatcatcggtgccaaggaccacgcatccatccagatgaacgtggccgaggttgacaaggtcacaggcaggtttaatggccagtttaaaacttatgctatctgcggggccattcgtaggatgggtgagtcagatgattccattctccgattggccaaggccgatggcatcgtctcaaagaacttttgactggagagaatcacagatgtggaatatttgtcataaataaataatgaaaacctaaaaaaaaaaaaaaaaaagggcgggcgctctagaggatccaagcttacgtacgccgtgcatgcgacgtcatagctcttctatagtgtcacctaaattcaattcactgccgcgttttacaacgtcgtgactgggaaaaccctgcggtacccaacttaatcgccttgcagcacatcccctttcgcagctgcgtaataagcgaaaaggnccgnaccgatcggcctttccaacagttgcgcancctggaatggcgaatgggaaccgcccttgancgggncaataancncggggggtngnggtggnttcccncaaaggggaccggttncntttcagnggnctaaagcccgtcntttggntttttcccttntttttncccngtggngggnttnccggaagnttaaaagggggcccctttgggccctttaaggnttagggccccccccaaatttt

SEQ ID NO: 1817 - DNA, 415 bp, Homo sapiens
  misc_feature (4)..(4): n equals a,t,g, or c
  misc_feature (14)..(14): n equals a,t,g, or c
  misc_feature (35)..(35): n equals a,t,g, or c
  misc_feature (38)..(38): n equals a,t,g, or c
  misc_feature (69)..(69): n equals a,t,g, or c
  misc_feature (117)..(117): n equals a,t,g, or c
  misc_feature (192)..(192): n equals a,t,g, or c
  misc_feature (337)..(337): n equals a,t,g, or c
  misc_feature (359)..(359): n equals a,t,g, or c
  misc_feature (364)..(364): n equals a,t,g, or c
  misc_feature (397)..(397): n equals a,t,g, or c
  misc_feature (414)..(414): n equals a,t,g, or c
ccgnaattcccggntcgacccacgcgtccgtgacnttnatatttcaagaggacatactccaaaagctgnggatgtccttgccaaggagattggattgcttgcagatgaaattgaaanctatggcaaaagcaaagccaaagtacgtttgtccgtgctagaaaggttaaaggatcaagcagatggaaaatacgncttagttgctgggtaagacgccatctaacatctacttgatcaagcagacatatttacaaaactcttccctatttatctctctcctcgtacccctcaatccatcctattctcacatttgacatttcgtccatttcattcggcattnctttatttggtgcgagaaaagntttantttcagtgcagagcaaactagtcgactctaccnaagataaaggcaaacang

SEQ ID NO: 1818 - DNA, 666 bp, Homo sapiens
  misc_feature (552)..(552): n equals a,t,g, or c
  misc_feature (615)..(615): n equals a,t,g, or c
  misc_feature (635)..(635): n equals a,t,g, or c
  misc_feature (644)..(644): n equals a,t,g, or c
  misc_feature (646)..(646): n equals a,t,g, or c
  misc_feature (658)..(658): n equals a,t,g, or c
ggccgaagcgtggaagaaaccctccgcttggtgaaggcgttccagtatgtagaaacacatggagaagtctgcccagcgaactggacaccggattctcctacgatcaagccaagtccagctgcttccaaagagtactttcagaaggtaaatcagtagatcacccatgtgtatctgcaccttctcaactgagagaagaaccacagttgaaacctgcttttatcattttcaagatggttatttgtagaaggcaaggaaccaattatgcttgtattcataagtattactctaaatgttttgtttttgtaattctggctaagaccttttaaacatggttagttgctagtacaaggaatcgtttattggtaacatcttggtggctggctagctagtttctacagaacataatttgcctctatagaaggctattcttagatcatgtctcaatggaaacactcttctttcttagccttacttgaatcttgcctataataaagtagagcaacacacattgaaagcttctgatcaacggtcctgaaatttcatcttgaatgnctttggattaaactgaatttcttttaagcttaccaagatcataaatttcaatgattaagcccnggtaacttctgcaatggaanggtttaatngngaattggaagcnaaatggtg

SEQ ID NO: 1819 - DNA, 706 bp, Homo sapiens
  misc_feature (3)..(3): n equals a,t,g, or c
  misc_feature (695)..(695): n equals a,t,g, or c
gtnaaaaaccaattcttcttaaatttagttcatctttctttaaaagaacattaaatgtaaccattttgtcagatccatgtattttggagcataaaatgtatgctgttgtgaccaataaatataaaatatggtaattggaattaactccacaccatagtatgcattgttatacatactgtgtacctaattatgtatagcagtgtagtctcaattatatctgaaagtaattgtgactaacaagtatgctttgccttatttccacatttaaactacctgttaatataagggatttgtagtatcagcttgttgagcaatgactttgaatctagttttcagtgatcagaagcagcagttatttgagtgtatgaatggaatgatgatcactgtgctataatgtactgaaaccaccatattacagaaatatttactacatattttccatctgtagtttctcagaagggctatggattagtttgaactgtcaaatccttgcatacttctgtgacacccctgcccattttctgtctttaattaaccaaggtgttaggtgtgactgtcacaactgttatgttttccagtaaactagaagtatgatatttgataattatatttggatttcaccacctaaatgtaatggtgattcctcaagaatgaaatgaaggcactacattgaaatatggtttggataaatttgncatggtgacag

SEQ ID NO: 1820 - DNA, 209 bp, Homo sapiens
  misc_feature (12)..(12): n equals a,t,g, or c
  misc_feature (42)..(42): n equals a,t,g, or c
  misc_feature (116)..(116): n equals a,t,g, or c
  misc_feature (175)..(175): n equals a,t,g, or c
  misc_feature (189)..(189): n equals a,t,g, or c
  misc_feature (197)..(197): n equals a,t,g, or c
  misc_feature (199)..(199): n equals a,t,g, or c
gctgtttctgtnatgagatggggaaagtgggctcaggaggtntggatctgtgatgagatgggggaagtgggctcaggaggtctggatctgtgatgagatggggaaagtgggctcangaggtctggatctgtgatgagatcgggaaagtgggctcaagaggtctggatctgtggtnagatgggggaaganggctcatnangtctggatct

SEQ ID NO: 1821 - DNA, 100 bp, Homo sapiens
  misc_feature (35)..(35): n equals a,t,g, or c
  misc_feature (48)..(48): n equals a,t,g, or c
  misc_feature (74)..(74): n equals a,t,g, or c
  misc_feature (77)..(77): n equals a,t,g, or c
  misc_feature (91)..(91): n equals a,t,g, or c
acctctgctacagcaactgcccttgcaggtgggtntgggacacctggnagaacgtctccaagggaagggttcanacntcttggtcgcaccncttcctggt

SEQ ID NO: 1822 - DNA, 349 bp, Homo sapiens
  misc_feature (220)..(220): n equals a,t,g, or c
  misc_feature (312)..(312): n equals a,t,g, or c
  misc_feature (318)..(318): n equals a,t,g, or c
  misc_feature (336)..(336): n equals a,t,g, or c
  misc_feature (343)..(344): n equals a,t,g, or c
ggctgccctgtggcctcgctcctcggaggtttttcagttatgggacaaaaatattatatcaaaacactgaagctttgcaatctaaattcttttcacctcttcaaaaagcgatgctaccacctaatagttttcaaggaaaagtggcattcattactgggggaggtactggccttggtaaaggaatgacaactcttctgtccagcctaggtgctcagtgcgngatagccagccggaagatggatgtttttgaaagctaccgcagaacaaatttcttctcaaactggaaataagggttatgcaatttaatgtgangggaanggacctgaaatgggtcanaacactnngttag

SEQ ID NO: 1823 - DNA, 576 bp, Homo sapiens
  misc_feature (464)..(464): n equals a,t,g, or c
  misc_feature (526)..(526): n equals a,t,g, or c
  misc_feature (538)..(538): n equals a,t,g, or c
  misc_feature (549)..(549): n equals a,t,g, or c
  misc_feature (564)..(564): n equals a,t,g, or c
  misc_feature (570)..(570): n equals a,t,g, or c
gattaagaccatgttggaagatttgggaatggatgatgaaggagatgatgacccagttcctctaccaaatgtgaatgcagcaatattaaaaaaggtcattcagtggtgcacccaccacaaggatgaccctcctcctcctgaagatgatgagaacaaagaaaagcgaacagatgatatccctgtttgggaccaagaattcctgaaagttgaccaaggaacactttttgaactcattctggctgcaaactacttagacatcaaaggtttgcttgatgttacatgcaagactgttgccaatatgatcaaggggaaaactcctgaggagattcgcaagaccttcaatatcaaaaatgactttactgaagaggaggaagcccaggtacgcaaagagaaccagtggtgtgaagagaagtgaaatgttgtgcctgacactgtaacactgtaaggattgttccaaatactanttgcactgctctgtttataattgttaatattagacaaacagtagacaaatgcagcatcaagncaattgtattancagaatattgncctcattgcatgtgnagtttnagcaca

SEQ ID NO: 1824 - DNA, 545 bp, Homo sapiens
  misc_feature (10)..(10): n equals a,t,g, or c
  misc_feature (407)..(407): n equals a,t,g, or c
  misc_feature (509)..(509): n equals a,t,g, or c
  misc_feature (523)..(523): n equals a,t,g, or c
  misc_feature (531)..(531): n equals a,t,g, or c
  misc_feature (539)..(539): n equals a,t,g, or c
  misc_feature (542)..(542): n equals a,t,g, or c
gcttgcctgnttctctggcccctggtcctgtcctgttctccagcatggtgtgtctgaagctccctggaggctcctgcatgacagcgctgacagtgacactgatggtgctgagctccccactggctttgtctggggacacccgaccacgtttcctgtggcagcctaagagggagtgtcatttcttcaatgggacggagcgggtgcggttcctggacagatacttctataaccaggaggagtccgtgcgcttcgacagcgacgtgggggagttccgggcggtgacggagctggggcggcctgacgctgagtactggaacagccagaaggacatcctggagcaggcgcgggccgcggtggacacctactgcagacacaactacggggttgtggagagcttcacagtgcancggcgagtccaacctaaggtgactgtatatccttcaaagacccagcccctgcagcaccacaaaccttctggtctgctctgtgagtggtttctatccaagcancattgaaagtcaangtgggttncttgaacnggncag

SEQ ID NO: 1825 - DNA, 577 bp, Homo sapiens
  misc_feature (10)..(10): n equals a,t,g, or c
  misc_feature (24)..(24): n equals a,t,g, or c
  misc_feature (26)..(26): n equals a,t,g, or c
  misc_feature (28)..(29): n equals a,t,g, or c
  misc_feature (234)..(234): n equals a,t,g, or c
  misc_feature (264)..(264): n equals a,t,g, or c
  misc_feature (285)..(286): n equals a,t,g, or c
  misc_feature (288)..(288): n equals a,t,g, or c
  misc_feature (308)..(308): n equals a,t,g, or c
  misc_feature (311)..(311): n equals a,t,g, or c
  misc_feature (320)..(320): n equals a,t,g, or c
  misc_feature (322)..(322): n equals a,t,g, or c
  misc_feature (391)..(391): n equals a,t,g, or c
  misc_feature (399)..(399): n equals a,t,g, or c
  misc_feature (408)..(408): n equals a,t,g, or c
  misc_feature (415)..(415): n equals a,t,g, or c
  misc_feature (431)..(431): n equals a,t,g, or c
  misc_feature (434)..(434): n equals a,t,g, or c
  misc_feature (448)..(448): n equals a,t,g, or c
  misc_feature (463)..(463): n equals a,t,g, or c
  misc_feature (469)..(469): n equals a,t,g, or c
  misc_feature (471)..(473): n equals a,t,g, or c
  misc_feature (491)..(491): n equals a,t,g, or c
  misc_feature (495)..(495): n equals a,t,g, or c
  misc_feature (497)..(497): n equals a,t,g, or c
  misc_feature (504)..(504): n equals a,t,g, or c
  misc_feature (542)..(542): n equals a,t,g, or c
atggcacctngaaaggggaaggantngnnggaagaacaggtcatcaagcctcggacctcaggtggctgaaggagagaatgtattttggtgtctgccatatctttgcatccttcaatgacacttttgtccatgtcactgatctttctggcaaggaaaccatctgccgtgtgactggtgggatgaaggtaaaggcagaccgagatgaatctcaccatatgctgctatgttggctgnccaggatgtggtccaataggttcaaaggancctggtattaaacggccctannanattaaaactttcggggccanagngaggggaantngggacccaataaccccttggaccttgggggcccaattcgggccctttaataagcccctttgcccggctnggggttanttgaaagantccgggncgggatttgaggaatnttnatcccccaattccncttttggacaggcanttcgcnannnaaaaggggggggttcgcncgtngngttcgcncgttcctgttgaaacaaaagaatttccttcaaaaaaanattttttctgggttaaataaaaaattggccctttc

SEQ ID NO: 1826 - DNA, 593 bp, Homo sapiens
  misc_feature (40)..(40): n equals a,t,g, or c
  misc_feature (278)..(278): n equals a,t,g, or c
  misc_feature (326)..(326): n equals a,t,g, or c
  misc_feature (464)..(464): n equals a,t,g, or c
  misc_feature (482)..(482): n equals a,t,g, or c
  misc_feature (541)..(541): n equals a,t,g, or c
  misc_feature (585)..(585): n equals a,t,g, or c
  misc_feature (589)..(589): n equals a,t,g, or c
  misc_feature (591)..(592): n equals a,t,g, or c
gatccattgtttggcaggaggtttttgatgataaagcaangcttgcgccgggcacaatagttgaagtatggaaagacagcgcatatcctgaggaactcagtagagtcacagcatctggcttccctgtaatcctttctgctccttggtacttagatttgattagctatggacaagattggaggaaatactataaagtggaacctcttgattttggcggtactcagaaacagaaacaacttttcattggtggagaagcttgtctatggggaagaatatgnggatgcaactaacctcactccaagattatggcctcgggcaagtgctgntggtgagagactctggagttccaaagatgtcagagatatggatgacgcctatgacagactgacaaggcaccgctgcaggatggtcgaacgtggaatagctgcacaacctctttatgctggatattgtaaccatgagancatgtaaaaaatggaggngaaaaaggccacagcaatctgtactacaatcaactttattttgaaatcatgtaaaatangatattagactggtttttgaataaaatattttaatgattgaaanaacntnna

SEQ ID NO: 1827 - DNA, 504 bp, Homo sapiens
  misc_feature (1)..(1): n equals a,t,g, or c
  misc_feature (17)..(17): n equals a,t,g, or c
  misc_feature (28)..(28): n equals a,t,g, or c
  misc_feature (33)..(33): n equals a,t,g, or c
  misc_feature (79)..(79): n equals a,t,g, or c
  misc_feature (85)..(85): n equals a,t,g, or c
  misc_feature (107)..(107): n equals a,t,g, or c
  misc_feature (433)..(433): n equals a,t,g, or c
  misc_feature (451)..(451): n equals a,t,g, or c
  misc_feature (462)..(462): n equals a,t,g, or c
  misc_feature (491)..(491): n equals a,t,g, or c
  misc_feature (495)..(495): n equals a,t,g, or c
nacatctttcggtttgnggttacgcccncaggncccggtccggaattcccgggtcgacccacgcgtccgaaaagacttnttgaanttgttgatgcggcaaatgctgngatttctcatatagatcaaacagccctagcagtttatattgcaatgaagactgatcccaggcctgatgcagctactataaaaaatgacatggacaaacaaaaatccaccctcgtagatgccctttgtaggaaaggttgtgccctggcagaccatcttcttcacacccaggctcaagacggagccatttccactgatgcagaaggaaaggaggaggaaggagaaagtcctttggattctctggcagaaacattttgggaaactactaaatggactgatctctttgacaataaggttttgacatttgcatataaacatgcattagtanataaaatgtatgggagangccttaaattngcaactaaacttgtggaaagaaaacccancaanagaaaactg

SEQ ID NO: 1828 - DNA, 555 bp, Homo sapiens
  misc_feature (1)..(1): n equals a,t,g, or c
  misc_feature (3)..(3): n equals a,t,g, or c
  misc_feature (212)..(212): n equals a,t,g, or c
  misc_feature (467)..(467): n equals a,t,g, or c
  misc_feature (487)..(487): n equals a,t,g, or c
  misc_feature (505)..(505): n equals a,t,g, or c
  misc_feature (541)..(541): n equals a,t,g, or c
ntngtaccaatctaaaaactccgtatttgggtgtattaacccatctctgggaagtagaggtttagtgtctattactcttccagacagcgtggtccacttggttcttgctgctctctttctggagtccagctcccagtctgtccttgcttacctcctacaagagtggacattaattgggtgaaaacatcgttttccatttttgtccctagttntctttcttaatgtgaatatttcttcattggttgaatatgacttgtggcataccaaggatgctgctgattagctagtggccctatagccattttctccagtctgccctggctcctgggatggaggaactgagtttgcaaatcagctccatcttcatatcaaggaatagtaaaataagagaaaggtgagggcttatggtctgatatgtattttttataaaaatggcgatgatacttaataattatctgccacaattnttttttctccctccataagngaaacaaagagtcctctncgtggaaaagaaaaaaatacgctccctttaaacggnggattgaaaatgag

SEQ ID NO: 1829 - DNA, 584 bp, Homo sapiens
  misc_feature (1)..(1): n equals a,t,g, or c
  misc_feature (22)..(22): n equals a,t,g, or c
  misc_feature (68)..(68): n equals a,t,g, or c
  misc_feature (70)..(70): n equals a,t,g, or c
  misc_feature (77)..(77): n equals a,t,g, or c
  misc_feature (329)..(329): n equals a,t,g, or c
  misc_feature (452)..(452): n equals a,t,g, or c
  misc_feature (506)..(506): n equals a,t,g, or c
  misc_feature (556)..(556): n equals a,t,g, or c
  misc_feature (561)..(561): n equals a,t,g, or c
  misc_feature (570)..(570): n equals a,t,g, or c
  misc_feature (573)..(573): n equals a,t,g, or c
nctctgactataattccggganaatggccccgcctgcaggtaccggtccggaattcccgggtcgaccntngcgtccnttcatgacccgtgagcaccgagcccccttctccttgcccttttctttccgttcaccctaaacaccaccggcgaggcgccggctttgaccttccgtagcttccctagcaaggcgtttctctgggcgcgctctgtagccaccctcacactcggtgcccggaaatcgagccctttgcccacggctacttcacgggaccaccctcccgggttaggcataggccctcccggatcttccgcggtgcggtaaccagcgngagctcgcccgccagaagaatatgaaaaagcagagcgactcggttaagggaaagcgccgagatgacgggctttctgctgccgcccgcaagcagagggactcggagatcatgcagcagaagcanaaaaaggcaaacgagaagaaggaggaacccaagtagctttgtggcttcgtgtcnaaccctcttgcccttcgcctgtgtgcctggagccagtcccaccatctagngtttnctctgtagnggnttacaggacca

SEQ ID NO: 1830 - DNA, 318 bp, Homo sapiens
  misc_feature (1)..(1): n equals a,t,g, or c
  misc_feature (15)..(15): n equals a,t,g, or c
  misc_feature (22)..(22): n equals a,t,g, or c
  misc_feature (31)..(31): n equals a,t,g, or c
  misc_feature (73)..(73): n equals a,t,g, or c
  misc_feature (102)..(102): n equals a,t,g, or c
  misc_feature (111)..(111): n equals a,t,g, or c
  misc_feature (118)..(119): n equals a,t,g, or c
  misc_feature (126)..(126): n equals a,t,g, or c
  misc_feature (152)..(152): n equals a,t,g, or c
  misc_feature (175)..(175): n equals a,t,g, or c
  misc_feature (257)..(257): n equals a,t,g, or c
  misc_feature (301)..(301): n equals a,t,g, or c
  misc_feature (307)..(307): n equals a,t,g, or c
  misc_feature (312)..(312): n equals a,t,g, or c
  misc_feature (317)..(317): n equals a,t,g, or c
ntcggtaaaagaatnccggganaacctgccngtaccggtccggaattcccgggtcgacccacgcgtccgcccnttcgtccgaatttcatgtgattgaggccnggcgcaggnccggagnncaagttncctggccgccagaagatccacatctnaaagaagtggggcttcaccaagnacaatgctgatgaatttgaagacatggtggctgaaaagcggctcatcccagatggctgtggggtcaagtacatccccagtcntggccctctggacaagtggcgggccctgcactcatgagggcttncaatgngctgnccccnt

SEQ ID NO: 1831 - DNA, 420 bp, Homo sapiens
  misc_feature (16)..(16): n equals a,t,g, or c
  misc_feature (63)..(63): n equals a,t,g, or c
  misc_feature (72)..(72): n equals a,t,g, or c
  misc_feature (94)..(94): n equals a,t,g, or c
  misc_feature (279)..(279): n equals a,t,g, or c
  misc_feature (340)..(340): n equals a,t,g, or c
  misc_feature (384)..(384): n equals a,t,g, or c
  misc_feature (395)..(395): n equals a,t,g, or c
  misc_feature (398)..(398): n equals a,t,g, or c
  misc_feature (409)..(409): n equals a,t,g, or c
tgggcaacccttaggnattgtcttggaacctttgggctgattatgtgcttgactggggatcancccggttancctggctcgggcgccaagcggnttaaggaggcggttattgttacttgcggggttactacttcggttaagtctcttactgcttttgcgtgtagaggtcatcgggggaataagactggtaagttttatatcgctttccgtaaggcgataggttgtcgtggtctcgcgtcggcatgttctactttcgtatttaggggtatcggtactgcncttgtattcgcgttcaagaagtcgtctacgacggtcggcactgacgatcgtcatattctantttggggtcgtatcgttatttcgggtaatcctgttaagttattnccggacgttanccncaaaatcaagncattcgatttt

SEQ ID NO: 1832 - DNA, 500 bp, Homo sapiens
  misc_feature (54)..(54): n equals a,t,g, or c
  misc_feature (57)..(57): n equals a,t,g, or c
  misc_feature (60)..(60): n equals a,t,g, or c
  misc_feature (85)..(85): n equals a,t,g, or c
  misc_feature (92)..(92): n equals a,t,g, or c
  misc_feature (221)..(221): n equals a,t,g, or c
  misc_feature (283)..(283): n equals a,t,g, or c
  misc_feature (337)..(337): n equals a,t,g, or c
  misc_feature (360)..(360): n equals a,t,g, or c
  misc_feature (370)..(370): n equals a,t,g, or c
  misc_feature (381)..(381): n equals a,t,g, or c
  misc_feature (412)..(412): n equals a,t,g, or c
  misc_feature (438)..(438): n equals a,t,g, or c
  misc_feature (447)..(447): n equals a,t,g, or c
  misc_feature (490)..(490): n equals a,t,g, or c
  misc_feature (500)..(500): n equals a,t,g, or c
gcccccaggcaccggtccggaattcccgggtcgacccacgcgtccggtgccccnttntcntcaggcacattcttctctgtgaagnggtcagnggggcctggcccagcccctgccacactccctggttgagcaggccctgcagagcctgaggtcagtggttgcagggcccctggggcagatgggcccccgtgctttgaaggagacctctggctggctgtggntgggcggctagatgagtagaaagaactcagcgtctgtggcttatgtgtctggctctctcggnccaagagtttgtctaagatctggaagacagaagcagtgacctccagagaagcantgacaggatgccctttagctccngacttctatnaccttcctttntccttgaaacagccaattgctacatcctcanggagccttccccacttacaaccacangatgacctnctggttacatgtctttttgtaacttatttaaccccaacatatntatggaatcn

SEQ ID NO: 1833 - DNA, 464 bp, Homo sapiens
  misc_feature (20)..(20): n equals a,t,g, or c
  misc_feature (24)..(24): n equals a,t,g, or c
  misc_feature (32)..(32): n equals a,t,g, or c
  misc_feature (85)..(85): n equals a,t,g, or c
  misc_feature (116)..(117): n equals a,t,g, or c
  misc_feature (304)..(304): n equals a,t,g, or c
  misc_feature (371)..(371): n equals a,t,g, or c
  misc_feature (422)..(422): n equals a,t,g, or c
  misc_feature (439)..(439): n equals a,t,g, or c
  misc_feature (448)..(448): n equals a,t,g, or c
  misc_feature (452)..(452): n equals a,t,g, or c
gactcttgggacaaatttcngtanaaggtccngaattcccgggtcgacccacgcgtccggaacagggtctttttgatacattgcntggtgtcttaattaactttggggtgcgaagnncattgacattaatatttctttctaaaaatatctaaagaatgtaaataactttactccttatgttactagtggacatttaaggtgttatgtacttaatatctttttagtgtatgctgtagtgtggcagcatgccacatgctgaaaggaaatgtacaatttacaaagaaatggcactttagaaatttgngctgctttttgctttattcatttcaagtacctttgtaggtggacaaaatttaatataactttcttgncaacaattaacaagaatataggaagcacaagaaagaaaacaaaaaattggncctaccactcagacagngatagatgnatgngctattatgctg

SEQ ID NO: 1834 - DNA, 583 bp, Homo sapiens
  misc_feature (1)..(1): n equals a,t,g, or c
  misc_feature (4)..(4): n equals a,t,g, or c
  misc_feature (21)..(21): n equals a,t,g, or c
  misc_feature (75)..(75): n equals a,t,g, or c
  misc_feature (83)..(83): n equals a,t,g, or c
  misc_feature (112)..(113): n equals a,t,g, or c
  misc_feature (525)..(525): n equals a,t,g, or c
  misc_feature (534)..(534): n equals a,t,g, or c
  misc_feature (537)..(539): n equals a,t,g, or c
  misc_feature (581)..(582): n equals a,t,g, or c
ntcntttggaaatttgggccnctgccccaccggtccggaattcccgggtcgacccacgcgtccggttcaaatgcnttttgggngtttttaatctttgtgacaggaaagcccnnccccttccccttctgtgtcacagttcttggtgactgtcccaccgggagcctccccctcagatgatctctccacggtagcacttgaccttttcgacgcttaacctttccgctgtcgccccaggccctccctgactccctgtgggggtggccatccctgggcccctccacgcctcctggccagacgctgccgctgccgctgcaccacggcgtttttttacaacattcaactttagtatttttactattataatataatatggaaccttccctccaaattcttcaataaaagttgcttttcaaaaaaaaaaaaaaagggcggccgctctagaggatccaaagcttacgtacgcgtgcatgcgaagtcataactcttctataggggcacctaaaattcaattcactggcccggcgntttacaacngtnnngactgggaaaaccctggcggtacccaacttaaatcggcttgnna

SEQ ID NO: 1835 - DNA, 532 bp, Homo sapiens
  misc_feature (7)..(7): n equals a,t,g, or c
  misc_feature (13)..(13): n equals a,t,g, or c
  misc_feature (74)..(74): n equals a,t,g, or c
  misc_feature (81)..(81): n equals a,t,g, or c
  misc_feature (83)..(83): n equals a,t,g, or c
  misc_feature (106)..(106): n equals a,t,g, or c
  misc_feature (111)..(111): n equals a,t,g, or c
  misc_feature (387)..(387): n equals a,t,g, or c
  misc_feature (428)..(428): n equals a,t,g, or c
  misc_feature (476)..(477): n equals a,t,g, or c
  misc_feature (481)..(481): n equals a,t,g, or c
  misc_feature (493)..(493): n equals a,t,g, or c
  misc_feature (500)..(500): n equals a,t,g, or c
  misc_feature (514)..(514): n equals a,t,g, or c
  misc_feature (529)..(529): n equals a,t,g, or c
tttcgtntggatntgggcccctgccccaccggtccggaattcccgggtcgacccacgcgtccgattttattatnttgtccntnacctgaagtgtttggtcttcagncttantggattacacttcaagattaaaccaatctagactgaatattggtgtggacatggggggtgggtgggagtagaaaattttgtgtatatcagggcagtatttttttatgaactataaatgattgtctttaataaatatgtgataaaatccaaaaaaaaaaaaaaaaaaagggcggccgctctagaggatccaagcttacgtacgcgtgcatgcgacgtcatagctcttctatagtggcacctaaattcaattcactggcccgcgtttacaaccgtcgngactgggaaaaccctggcgttacccaacttaatcgccttgnaagcacattcccctttcgcagctgggcgtaataaccgaaaaaggccgnncgancggccttccaanaagtgcnaaacctgaatgggnaatgggaccgccctngaa

SEQ ID NO: 1836 - DNA, 464 bp, Homo sapiens
  misc_feature (26)..(26): n equals a,t,g, or c
  misc_feature (46)..(46): n equals a,t,g, or c
  misc_feature (352)..(352): n equals a,t,g, or c
  misc_feature (418)..(418): n equals a,t,g, or c
  misc_feature (430)..(430): n equals a,t,g, or c
  misc_feature (437)..(437): n equals a,t,g, or c
  misc_feature (439)..(439): n equals a,t,g, or c
  misc_feature (447)..(447): n equals a,t,g, or c
gcttaatgtattcactttgacataantaaattgccataaattgacngtcacgttaagattgtatgaccactttgtctagaataaacctttttttagcctgatttctttttttttccaattttttttttcagctaaaaatatctttagaattcgcttccatgacccctctccagcccagtctcacactctgcaagccaatgacgtgttccacaagcagcagtggttcaactgtattcgagcggccattgcccccttccagtcggcaggcagtccacctgagctgcagggcctgccggagctgcacgaagagtgtgaggggaaccacccctctgcgaggaaactcacagcccanaggagggcatccacagtttccagtgttactcaggtagaagttgatgaaaacgcttacagatgtggntctggcatgcanaaggcanangacagcangaacttaaagaccacca

SEQ ID NO: 1837 - DNA, 214 bp, Homo sapiens
  misc_feature (12)..(12): n equals a,t,g, or c
  misc_feature (27)..(27): n equals a,t,g, or c
  misc_feature (40)..(40): n equals a,t,g, or c
  misc_feature (43)..(43): n equals a,t,g, or c
  misc_feature (79)..(79): n equals a,t,g, or c
  misc_feature (124)..(124): n equals a,t,g, or c
  misc_feature (145)..(145): n equals a,t,g, or c
  misc_feature (191)..(191): n equals a,t,g, or c
  misc_feature (197)..(197): n equals a,t,g, or c
  misc_feature (207)..(207): n equals a,t,g, or c
ccaggaccgctngggcattggggagantgaggaaggagcnganggccgaggggcgggacgcaaggacattacctccatnctgagagccccagcggacccccttgagcatcagggacagccaganccagcgccacgcccagggccncctgctgggacaccaccacccacggccagacactgccaggagcacncccgcnagcaacgggncaccagc

SEQ ID NO: 1838 - DNA, 518 bp, Homo sapiens
  misc_feature (1)..(1): n equals a,t,g, or c
  misc_feature (8)..(8): n equals a,t,g, or c
  misc_feature (59)..(59): n equals a,t,g, or c
  misc_feature (65)..(65): n equals a,t,g, or c
  misc_feature (80)..(80): n equals a,t,g, or c
  misc_feature (102)..(102): n equals a,t,g, or c
  misc_feature (291)..(291): n equals a,t,g, or c
  misc_feature (315)..(315): n equals a,t,g, or c
  misc_feature (322)..(322): n equals a,t,g, or c
  misc_feature (430)..(430): n equals a,t,g, or c
  misc_feature (487)..(487): n equals a,t,g, or c
  misc_feature (492)..(492): n equals a,t,g, or c
  misc_feature (496)..(496): n equals a,t,g, or c
  misc_feature (500)..(500): n equals a,t,g, or c
nataactntcgggaaaaactccctgcaggtacccggtccggaattcccgggtcgacccncgcgtncggaactttctaacngtaatcaatgtgaaacagcctncagccaacatctacatcttgtttgcaagaaaactagccaaaatctacatcttgtttgcaagaaaactcacactcaagagaaaccatataaatgcagtgactgtgaaaaaggcttaccttcctcctcacacctcagagaatgtgtaagaatttatggtggagagagaccatatactcataaggagtatgncgaaaccttttctcaatctacagnccttttngacacatgcaaactcaagatggagaaaaattctatgaatgtaaagcatgtgggaaacccttcactgagtcgcatatcttactcaacatttaagaactcatagtagagnggtacctatagaacataagaaattggcaaaagccttggcttttccccaaacttggcnaaccntatnaganctaagaactagaggaaac

SEQ ID NO: 1839 - DNA, 647 bp, Homo sapiens
  misc_feature (2)..(2): n equals a,t,g, or c
  misc_feature (12)..(12): n equals a,t,g, or c
  misc_feature (43)..(43): n equals a,t,g, or c
  misc_feature (567)..(567): n equals a,t,g, or c
  misc_feature (587)..(587): n equals a,t,g, or c
  misc_feature (634)..(634): n equals a,t,g, or c
  misc_feature (646)..(647): n equals a,t,g, or c
gntgaggcagtntttacattatggaaatgtctaagtatttttnccggaacttcaactttttctttttgttttacataaacatttaagcagctaggaacttttagttttaattaggtcagttgaagttctctggtgaactaaaaaatctacattttggttggggataaagatttgattttaaaaacagcttgaatttaaagcaagaaaaagatgaacgttatagttttaaaatcaatattagcagagccatagataggctgagctcttatttggggttctgagaaataactcagtttaaaacttctttaactgcctcccttagtacccaggctagcccatggtgacatcagggatattcattactgattggcctctagtattccaagggtactactatagatattacaatgatgctgttactaagtgataaccccgaatcttacaggactgactttgactcaataaaccactcacctattattggaaaatgccataaggccttgagaaagtataggtacattcctacaaatatatgaaagtaaggcactacttacaaggaaaaaaaanggaaatacattttctttttnggaaccgaccctaataaggggaaataatggaataagaaaaggaaaanctgaaaaaaaann

SEQ ID NO: 1840 - DNA, 273 bp, Homo sapiens
  misc_feature (8)..(8): n equals a,t,g, or c
  misc_feature (36)..(36): n equals a,t,g, or c
  misc_feature (49)..(49): n equals a,t,g, or c
  misc_feature (51)..(52): n equals a,t,g, or c
  misc_feature (78)..(78): n equals a,t,g, or c
  misc_feature (86)..(86): n equals a,t,g, or c
  misc_feature (109)..(109): n equals a,t,g, or c
  misc_feature (129)..(129): n equals a,t,g, or c
  misc_feature (155)..(155): n equals a,t,g, or c
  misc_feature (164)..(164): n equals a,t,g, or c
  misc_feature (171)..(171): n equals a,t,g, or c
  misc_feature (205)..(205): n equals a,t,g, or c
  misc_feature (224)..(224): n equals a,t,g, or c
  misc_feature (232)..(233): n equals a,t,g, or c
  misc_feature (247)..(247): n equals a,t,g, or c
  misc_feature (255)..(255): n equals a,t,g, or c
  misc_feature (257)..(257): n equals a,t,g, or c
ggaccggnccggaattcccgggtcgacccacgcgtntgaccacgcgttngnntcgaacccaccccatctgcatgcctnacaggggncgaaagtaaaaataaaaagaacnacgatgcgggcgaggcttgngggggagagaagaggagataccacgnctccccagngctgcgncctgataggacccccagggccttccgagccctcncccagcgaccacctcgagncccggagnngcagcaagagatgngagaaggngncaccctgaagaggaag

SEQ ID NO: 1841 - DNA, 793 bp, Homo sapiens
  misc_feature (8)..(8): n equals a,t,g, or c
  misc_feature (470)..(473): n equals a,t,g, or c
  misc_feature (478)..(478): n equals a,t,g, or c
  misc_feature (482)..(482): n equals a,t,g, or c
  misc_feature (487)..(491): n equals a,t,g, or c
  misc_feature (497)..(497): n equals a,t,g, or c
  misc_feature (499)..(499): n equals a,t,g, or c
  misc_feature (508)..(508): n equals a,t,g, or c
  misc_feature (556)..(556): n equals a,t,g, or c
  misc_feature (559)..(559): n equals a,t,g, or c
  misc_feature (566)..(566): n equals a,t,g, or c
  misc_feature (568)..(568): n equals a,t,g, or c
  misc_feature (572)..(572): n equals a,t,g, or c
  misc_feature (582)..(583): n equals a,t,g, or c
  misc_feature (589)..(589): n equals a,t,g, or c
  misc_feature (613)..(613): n equals a,t,g, or c
  misc_feature (627)..(627): n equals a,t,g, or c
  misc_feature (629)..(629): n equals a,t,g, or c
  misc_feature (643)..(643): n equals a,t,g, or c
  misc_feature (647)..(648): n equals a,t,g, or c
  misc_feature (665)..(665): n equals a,t,g, or c
  misc_feature (684)..(684): n equals a,t,g, or c
  misc_feature (686)..(686): n equals a,t,g, or c
  misc_feature (692)..(692): n equals a,t,g, or c
  misc_feature (723)..(723): n equals a,t,g, or c
  misc_feature (725)..(725): n equals a,t,g, or c
  misc_feature (729)..(730): n equals a,t,g, or c
  misc_feature (734)..(734): n equals a,t,g, or c
  misc_feature (752)..(752): n equals a,t,g, or c
  misc_feature (780)..(780): n equals a,t,g, or c
gcccacgnttccgatgggccgcgttcgcaccaaaaccgtgaagaaggcggcccgggtcatcatagaaaagtactacacgcgcctgggcaacgacttccacacgaacaagcgcgtgtgcgaggagatcgccattatccccagcaaaaagctccgcaacaagatagcaggttatgtcacgcatctgatgaagcgaattcagagaggcccagtaagaggtatctccatcaagctgcaggaggaggagagagaaaggagagacaattatgttcctgaggtctcagccttggatcaggagattattgaagtagatcctgacactaaggaaatgctgaagcttttggacttcggcagtctgtccaaccttcaggtcactcagcctacagttgggatgaatttcaaaacgcctcggggacctgtttgaattttttctgtagtgctgtattattttcaataaatctgggacaacagcnnnntaaanaaancgttnnnnncccaananggggcgggncgctcttagaaggatccaagccttaccgtaccgccggggcattgcganggncataagncntctntcttattagnnggggcnaccctaaaattttcaatttcaacntgggccccggtccngnttttttaacaaacnggtnncgggggaccttgggggnaaaaaaacccccttggggngnttttancccccaaaccttttaaattccgcccttttgngnaggnnaccnattcccccccctttttcnccccagctttgggggttaattaaaccgnaaaaaaggccccc

SEQ ID NO: 1842 - DNA, 405 bp, Homo sapiens
  misc_feature (1)..(1): n equals a,t,g, or c
  misc_feature (39)..(39): n equals a,t,g, or c
  misc_feature (390)..(390): n equals a,t,g, or c
  misc_feature (399)..(400): n equals a,t,g, or c
  misc_feature (402)..(403): n equals a,t,g, or c
ntccaaaattcccgggtcgacccacgcgtctgtgaaaanccatttttgcattgttcctcatccgcctccttgctcgccgcagccgcctccgccgcgcgcctcctccgccgccgcggactccggcagctttatcgccagagtccctgaactctcgctttctttttaatcccctgcatcggatcaccggcgtgccccaccatgtcagacgcagccgtagacaccagctccgaaatcaccaccaaggacttaaaggagaagaaggaagttgtggaagaggcagaaaatggaagagacgcccctgctaacgggaatgctaatgaggaaaatggggagcaggaggctgacaatgaggtagacgaagaagaggaagaaggtggggaggaagaggangaccttccnncnnac

SEQ ID NO: 1843 - DNA, 693 bp, Homo sapiens
  misc_feature (2)..(2): n equals a,t,g, or c
  misc_feature (4)..(4): n equals a,t,g, or c
  misc_feature (10)..(10): n equals a,t,g, or c
  misc_feature (39)..(39): n equals a,t,g, or c
  misc_feature (522)..(522): n equals a,t,g, or c
  misc_feature (580)..(580): n equals a,t,g, or c
  misc_feature (609)..(609): n equals a,t,g, or c
  misc_feature (648)..(648): n equals a,t,g, or c
  misc_feature (664)..(664): n equals a,t,g, or c
  misc_feature (671)..(671): n equals a,t,g, or c
  misc_feature (674)..(674): n equals a,t,g, or c
gntntctttntgaagaccctgactggtaagaccgtcagnctcgatgtggagccgagtgacaccattgagaatgtcaaggcaaagatccaagacaaggaaggcatccctcctgatcagcagaggttgatctttgctgggaaacagctggaagatggacgcaccctgtctgactacaacatccagaaagagtccaccctgcacctggtgctccgtcttagaggtgggatgcagatcttcgtgaagaccctgactggtaagaccatcactctcgaagtggagccgagtgacaccattgagaatgtcaaggcaaagatccaagacaaggaaggcatccctcctgaccagcagaggttgatctttgctgggaaacagctggaagatggacgcaccctgtctgactacaacatccagaaagagtccaccctgcacctggtgctccgtcttagaggtgggatgcagatcttcgtgaagaccctgactggtaagaccatcactctcgaagtggagccgagtgacaccatngagaatgtcaaggcaaagatccaagacaaggaaagcatccctcctgaccagcagaagntgatctttgctgggaaacagctggaaganggacgcaccctgtctgactacaacatccaagaaagaagnccaccctgcacctggngctccgnctnaaaaggtggggatgccaaa

SEQ ID NO: 1844 - DNA, 561 bp, Homo sapiens
  misc_feature (15)..(16): n equals a,t,g, or c
  misc_feature (50)..(50): n equals a,t,g, or c
  misc_feature (470)..(470): n equals a,t,g, or c
  misc_feature (489)..(489): n equals a,t,g, or c
  misc_feature (497)..(497): n equals a,t,g, or c
  misc_feature (545)..(545): n equals a,t,g, or c
  misc_feature (551)..(551): n equals a,t,g, or c
ggtcggtcatttaannaatggcccctatgcacagagccataggaactggnggccttccctggacagtgatcatgccaggcctggacctttaggcctgcctccccaggactccttagatcccactctttctacagacttctgtgatcacagccccctgcgggcaggggggctctccctccaccaactctcaaggctcctcagcctaagactatggctcatgagaaacactcaggcctgacctaggcttgggagtcaaactgctcatattgagcatattgttaagtgggtaaagccaagtaaaggtactgggtgtttttgtgaccacttgtgaatgggtgtatggagaactgaaaagggtatctgcatgaaggctcctgtctgactattccaggatccaatattactgccttctgaaacttcctctttagggtaaccatcatgtatgcccacgagggtgataagtaattcgngagactgaagttgctttanagtacttntttgaccaaggaataccacagacaccctacccgatagaaacagagggntcagancttacttgct

SEQ ID NO: 1845 - DNA, 652 bp, Homo sapiens
  misc_feature (5)..(5): n equals a,t,g, or c
  misc_feature (12)..(12): n equals a,t,g, or c
  misc_feature (60)..(61): n equals a,t,g, or c
  misc_feature (566)..(566): n equals a,t,g, or c
  misc_feature (608)..(608): n equals a,t,g, or c
  misc_feature (610)..(610): n equals a,t,g, or c
  misc_feature (650)..(650): n equals a,t,g, or c
  misc_feature (652)..(652): n equals a,t,g, or c
ggctnaccgtcncggtccggaattcccgggtcgacccacgcgtccggtcgcggcgacatnnccattacgtaccaagaaagtcgggatcgtcggtaaatacgggacccgctatggggcctccctccggaaaatggtgaagaaaattgaaatcagccagcacgccaagtacacttgctctttctgtggcaaaaccaagatgaagagacgagctgtggggatctggcactgtggttcctgcatgaagacagtggctggcggtgcctggacgtacaataccacttccgctgtcacggtaaagtccgccatcagaagactgaaggagttgaaagaccagtagacgctcctctactctttgagacatcactggcctataataaatgggttaatttatgtaacaaaaaaaaaaaaaaaaagggcggccgctctagaggatccaagcttacgtacgcgtgcatgcgacgtcatagctcttctatagtgtcacctaaattcaattcactggccgtcgttttacaacgtcgtgactgggaaaaccctggcgttacccaacttaatcgccttgcagnacatccccctttcgccagctggcgtaatagcgaataggcccngnaccgatcgcccttccaacaagttgcgcagtctgaatggcnan

SEQ ID NO: 1846 - DNA, 678 bp, Homo sapiens
  misc_feature (10)..(10): n equals a,t,g, or c
  misc_feature (16)..(16): n equals a,t,g, or c
  misc_feature (581)..(581): n equals a,t,g, or c
  misc_feature (625)..(625): n equals a,t,g, or c
  misc_feature (654)..(654): n equals a,t,g, or c
  misc_feature (664)..(664): n equals a,t,g, or c
  misc_feature (674)..(674): n equals a,t,g, or c
ggtcgggggntggatnggaggtgagcgggcgctagggccgcgagcccccgccggcccttcctccagcgccctgcggaccccgcagaaggcgctcgcctccctagcccgcaaaaacatatcgatttttctcgctgtggcaacggggacgtcctgatagatcctctgctccaataggcaactccggccttccctgccctgacctggaacctctgggagggctgcagaccaagcagaggctcccgtgcaggaagagaagctgtcagcaagcacctcaaatttgccatgctggctggtggaagagtttgtggtagcagaagagtgctctccatgctctaatttccgggctaaaactacccctgagtgtggtcccacaggatatgtagagaaaatcacatgcagctcatctaagagaaatgagttcaaaagctgccgctcagctttgatggaacaacgcttattttggaagttcgaaggggctgtcgtgtgtgtggccctgatcttcgcttgtcttgtcatcattcgtcagcgacaattggacagaaaggctctggaaaaggtccggaagcaaatctagtccatanagctacattccacccttgatcctgggtcttagaaaccctatctnagacagtgaaagtgaaatggactgaattngactcttggntcttttggancctt

SEQ ID NO: 1847 - DNA, 614 bp, Homo sapiens
  misc_feature (8)..(8): n equals a,t,g, or c
  misc_feature (13)..(13): n equals a,t,g, or c
  misc_feature (15)..(15): n equals a,t,g, or c
  misc_feature (543)..(543): n equals a,t,g, or c
  misc_feature (552)..(552): n equals a,t,g, or c
  misc_feature (570)..(570): n equals a,t,g, or c
  misc_feature (602)..(603): n equals a,t,g, or c
gcgaaganttatntnggcctggagataaagtccctccaattaaaccaaacgctggggaagaatctgtcatgaatcttgacaaattgagatttgctgatggaagcataagaacatcggaactgcgactcagcatgcagaagtcaatgcaaaatcatgctgccgtgttccgtgtgggaagcgtgttgcaagaaggttgtgggaaaatcagcaagctctatggagacctaaagcacctgaagacgttcgaccggggaatggtctggaacacagacctggtggagaccctggagctgcagaacctgatgctgtgtgcgctgcagaccatctacggagcagaggcgcggaaggagtcacggggcgcgcatgccagggaagactacaaggtgcggattgatgagtacgattactccaagcccatccaggggcaacagaagaagccctttgaggagcactggaggaagcacaccctgtcctttgtggacgttggcactgggaaggtcactctggaatatagacccgtatccgacaaaactttgaaccgangctgactgngccaccatcccgccagcnattcgctcctactgaatgagacaagatgtggnngatgacagaat

SEQ ID NO: 1848 - DNA, 644 bp, Homo sapiens
  misc_feature (15)..(15): n equals a,t,g, or c
  misc_feature (17)..(18): n equals a,t,g, or c
  misc_feature (342)..(342): n equals a,t,g, or c
  misc_feature (432)..(432): n equals a,t,g, or c
  misc_feature (482)..(482): n equals a,t,g, or c
  misc_feature (568)..(568): n equals a,t,g, or c
  misc_feature (579)..(579): n equals a,t,g, or c
  misc_feature (588)..(588): n equals a,t,g, or c
  misc_feature (600)..(600): n equals a,t,g, or c
  misc_feature (629)..(629): n equals a,t,g, or c
gcaagaattcaattnannttcagtatcaagaaagccctggatgccaaaattgcaagatacaaggctccatttcatcagttgcgcattcagtatggaaccagcaaaggaaagaactatactgaggaagaagatagattcttgatttgtatgttacacaaaatgggctttgatagagaaaatgtatatgaagaattaagacagtgtgtacgaaatgctccccagtttagatttgactggtttatcaagtctaggactgccatggaattccagagacgctgtaacactctgatttcattgattgagaaagaaaatatggaaattgaggaaagagagagagcaganaagaagaaacgggcaactaaaactccaatgtcacagaaaagaaaagcagagtcagctactgagagctctggaaagaaggatgtcaagaangtgaaatcctaaagcctagaaataaagttttaaatgggaaactgctattntcttgatcccatcttcaaatgctaattgccagttcccagtgtatttcatggtactctaaagaaaaatctcttttggttttgaattncttgcatattntatatattnttacaatgcttnctacctgaaaatgtgaagcttttaatatnattaatgggcattct

SEQ ID NO: 1849 - DNA, 741 bp, Homo sapiens
  misc_feature (12)..(12): n equals a,t,g, or c
  misc_feature (16)..(16): n equals a,t,g, or c
  misc_feature (598)..(598): n equals a,t,g, or c
  misc_feature (667)..(667): n equals a,t,g, or c
  misc_feature (684)..(684): n equals a,t,g, or c
  misc_feature (691)..(691): n equals a,t,g, or c
  misc_feature (700)..(700): n equals a,t,g, or c
  misc_feature (732)..(732): n equals a,t,g, or c
gcaagaatatanttanctccagaaagataaccctgctgaatatgccagtttaatggaaatactttatacccttaaggaaaaagggtcaagcaaccacaacctgctggctgcacctcgagcagcgctgactcggcttaaccagcaggcccaccagctggctttcgattccgtgttcctgcgcatcaaacaacagctgttgcttatttcgaagatggacagctggaatacggctggcatcggagaaaccctcacagatgaactgcccgcctttagtctcacccctctcgagtacatcagcaacatcgggcagtacatcatgtccctccccctgaatcttgagccatttgtgactcaggaggactctgccttagagttggcattgcacgctggaaagctgccatttcctcctgagcagggggatgaattgcccgagctggacaacatggctgacaactggctgggctcgatcgccagagccacaatgcagacctactgtgatgcgatcctacagatccctgagctgagcccacactctgccaagcagctggccactgacatcgactatctgatcaacgtgatggatgccctgggcctgcancccgtcccgcaccctccagcacatcgtgacgctactgaagaccaggcctgaggactatagacaggtcancaaaagcctgccccgtngcctggncaccaccgnggccaccatgcggagtgtgaattcctgacccnaccaaacac

SEQ ID NO: 1850 - DNA, 712 bp, Homo sapiens
  misc_feature (4)..(4): n equals a,t,g, or c
  misc_feature (7)..(8): n equals a,t,g, or c
  misc_feature (11)..(11): n equals a,t,g, or c
  misc_feature (65)..(65): n equals a,t,g, or c
  misc_feature (534)..(534): n equals a,t,g, or c
  misc_feature (653)..(653): n equals a,t,g, or c
  misc_feature (672)..(672): n equals a,t,g, or c
  misc_feature (688)..(688): n equals a,t,g, or c
  misc_feature (700)..(700): n equals a,t,g, or c
  misc_feature (711)..(711): n equals a,t,g, or c
cttntgnntangtgcccgcctgcaggtaccggtccggaattcccgggtcgacccacgctttcttngacgcgtgggcccaggttcaatgcccctctcagctgaggaggaaccgagagcggcgctggggcacctgagcccaggaaggcaacaggccggccgggaccgcgagtgcctggcggagcaggcgcagcccaggactcccggctcccacctccggctgtagtccagggccaaggcttgtgttcaatcgtgtgaatggccggcgggccccctccacgtccccatccttcgaggggacccaggagacctacacagtggcccacgaggagaatgtccgctttgtgtccgaagcctggcagcaggtgcaacagcagctggatggtggcccagccggtgagggcgggccaaggcctgtgcagtacgtggagaggacccccaatccccggctgcagaacgagtggtgggcgcagcagttcctggcgagaatcaccagctgttcctagtggctgctgggagggggcgctgctacacggncgacctgtcgccaggagagaagcatggcgcccttgcccacccactgccctggctgggtgccggccacacctgaagtgccagcatttggacttttgcacctttttttcccttggcccggnttgtccaacccaagcttgncattgggccaaagggnccgaaacccgtnttgaaccttang

SEQ ID NO: 1851 - DNA, 765 bp, Homo sapiens
  misc_feature (6)..(6): n equals a,t,g, or c
  misc_feature (572)..(572): n equals a,t,g, or c
  misc_feature (609)..(609): n equals a,t,g, or c
  misc_feature (698)..(698): n equals a,t,g, or c
  misc_feature (737)..(737): n equals a,t,g, or c
  misc_feature (744)..(744): n equals a,t,g, or c
  misc_feature (763)..(763): n equals a,t,g, or c
ggagantttagtacttttctcagaactagtgagacgggcattgtggatcaggttatggtaactctcaatcaggaaggatataaattttgtaaaataagggtacgctctgttaggattccacagattggagacaaatttgctagtcgacatggtcaaaagggtacttgtggtattcagtatagacaagaggatatgcctttcacctgtgaaggtatcacccctgatatcatcatcaatccccatgccatcccctctcgtatgactattggtcacttaattgaatgccttcaagggaaggtatcggctaacaagggtgaaattggtgatgccactccatttaatgatgctgttaacgtgcagaagatttctaatcttttatctgattatggctatcatctcagaggaaatgaggtcctgtacaatgggttcactggtcgaaaaatcacatcacaaatatttattggccccacttattaccagcgtttgaagcatatggtggatgataagattcactctcgtgctaggggacctattcagatcctcaatagacagccatggagggtagatctcgngatggtggcctgcgttttggagaaactggaccgagantgtcagattgcccatggagcaccccagttttaagggaaagattgttgaggcatcaagatccatatcaaggtcatggttgcaatctttgnggaataatggcgattgccaacaccaggacccatcctatnaatgcangggcttgccgcaataaaancc

SEQ ID NO: 1852 - DNA, 783 bp, Homo sapiens
  misc_feature (319)..(319): n equals a,t,g, or c
  misc_feature (639)..(639): n equals a,t,g, or c
  misc_feature (656)..(656): n equals a,t,g, or c
  misc_feature (664)..(664): n equals a,t,g, or c
  misc_feature (684)..(684): n equals a,t,g, or c
  misc_feature (702)..(702): n equals a,t,g, or c
  misc_feature (724)..(724): n equals a,t,g, or c
  misc_feature (745)..(745): n equals a,t,g, or c
  misc_feature (783)..(783): n equals a,t,g, or c
gatccatgctatggccatgcggaaggtccgggaggtgcgagctcaactcaaggacatcatggtgcagcagcggatgagcctggcctcgtgtggcactgactgggacatcgtcaggaagtgcatctgtgctgcctatttccaccaagcagccaagctcaagggaatcggggagtacgtgaacatccgcacagggatgccctgccacttgcaccccaccagctccctttttggaatgggctacaccccagattacatagtgtatcacgagttggtcatgaccaccaaggagtatatgcagtgtgtgaccgctgtggacggngagtggctggcggagctgggccccatgttctatagcgtgaaacaggcgggcaagtcacggcaggagaaccgtcgtcgggccaaagaggaagcctctgccatggaggaggagatggcgctggccgaggagcagctgcgagcccggcggcaggagcaggagaagcgcagccccctggcagtgtcaggtctacgaagatctacactccaggccggaaagagcaaggggagcccatgacccctcgccgacgccagcccgctttggtctgtgagcttgaggcttgtcccccagagaggaatggcaagcaagggcaagtttcctgnttggaccaagacttttnttggccanaaggaaaggtgggaagttcntttccattgccagggaanccaccgggcattgggcccgggnaaagccggggggccttgcaanaagtatttccccaaggttgccttgcccggggggcaaan

SEQ ID NO: 1853 - DNA, 399 bp, Homo sapiens
  misc_feature (5)..(5): n equals a,t,g, or c
  misc_feature (9)..(9): n equals a,t,g, or c
  misc_feature (15)..(15): n equals a,t,g, or c
  misc_feature (20)..(20): n equals a,t,g, or c
  misc_feature (45)..(45): n equals a,t,g, or c
  misc_feature (119)..(120): n equals a,t,g, or c
  misc_feature (124)..(124): n equals a,t,g, or c
  misc_feature (144)..(144): n equals a,t,g, or c
  misc_feature (154)..(154): n equals a,t,g, or c
  misc_feature (160)..(160): n equals a,t,g, or c
  misc_feature (176)..(176): n equals a,t,g, or c
  misc_feature (182)..(182): n equals a,t,g, or c
  misc_feature (194)..(194): n equals a,t,g, or c
  misc_feature (198)..(198): n equals a,t,g, or c
  misc_feature (203)..(203): n equals a,t,g, or c
  misc_feature (242)..(242): n equals a,t,g, or c
  misc_feature (248)..(248): n equals a,t,g, or c
  misc_feature (273)..(273): n equals a,t,g, or c
  misc_feature (290)..(290): n equals a,t,g, or c
  misc_feature (298)..(298): n equals a,t,g, or c
  misc_feature (350)..(350): n equals a,t,g, or c
  misc_feature (371)..(371): n equals a,t,g, or c
  misc_feature (381)..(381): n equals a,t,g, or c
  misc_feature (383)..(384): n equals a,t,g, or c
gaagnaganaggtangtggntagacagggctatagccttcatttngctgaaggaaaattgaccatgtaaagaggtcaaggggggagcctagatccaaaagctggctttataaccaccanncaanggctctgttcaccaccaagncaactcttanggcagnagtaatgtgtccttantaacanttgaacccaggnctanaaaangcttgtccataacaaggctcaataaacatgtgcataatntaactnggaagaaaaatgcagtgagtatctntcattttcatggtacanaggaaagnacctcatgcctatttaaaatattatactgaaagtgtgacatgtgcattctgnattcgctatatctatcccatnatttaaaggntnnccaaagtaagtcatt

SEQ ID NO: 1854 - DNA, 598 bp, Homo sapiens
  misc_feature (99)..(99): n equals a,t,g, or c
  misc_feature (125)..(125): n equals a,t,g, or c
  misc_feature (333)..(333): n equals a,t,g, or c
  misc_feature (343)..(343): n equals a,t,g, or c
  misc_feature (346)..(347): n equals a,t,g, or c
  misc_feature (414)..(414): n equals a,t,g, or c
  misc_feature (532)..(532): n equals a,t,g, or c
  misc_feature (570)..(570): n equals a,t,g, or c
  misc_feature (576)..(576): n equals a,t,g, or c
  misc_feature (579)..(579): n equals a,t,g, or c
  misc_feature (583)..(583): n equals a,t,g, or c
ggcaatgttttcctggacccttagctggtgccagggggtggggcctccgagatggctgtggcccatgccttgacagaaaaatccaaggccatgactggngtggaacaatggccatacagggctgntgcccaggccctagaggtcattcctcgtaccctgatccagaactgtggggccagcaccatccgtctacttacctcccttcgggccaagcacacccaggagaactgtgagacctggggtgtaaatggtgagacgggactttggaggacatgaaaggactgggcatatgggagccattgctgtgaaagctgcagacttataagacagcantggagacggnagnnctgctactgcgaattgatgacatcgtttcaggcccaaagaaaggcgatgaccagagcccggcaaggnggggctactgatgctggccaggagtgagtgctaggcaaggctacttcaatgcacagaaccaggcagagtcttcccttttcctggggccagaatgccaaggaacacttgtggaccgtcnttggttcaagaaagggaatcaggtttgggggggcaagncccccnagncccntttttgggccccaag

SEQ ID NO: 1855 - DNA, 560 bp, Homo sapiens
  misc_feature (21)..(21): n equals a,t,g, or c
  misc_feature (251)..(251): n equals a,t,g, or c
  misc_feature (305)..(305): n equals a,t,g, or c
  misc_feature (478)..(478): n equals a,t,g, or c
  misc_feature (496)..(496): n equals a,t,g, or c
  misc_feature (518)..(518): n equals a,t,g, or c
  misc_feature (548)..(549): n equals a,t,g, or c
gcttggatttttgattttccntaagaggctcatccctgcttcttcccagaagttttcagtctctgttgtatttttctgctcatagtctgtttcagatttacccataattctctcgactcctgcagattccccactgctccaatgcatcacctcagttccttgtgttttctgcactgccagcatgatacacacaataccctgatactcctaccaatgtctgagtcaggtgaggcagaatctagaccttctgncagacactaaagatgccattatcatgggatggaggtccacttttttctttctgntttagagaggagctctaaattgggaagtaatgcaggaaacaagccttgtaaaaatcaacttggattcacttttcagttacatctgagtgatctacagctatttcaaagctgaaaggaaaatttctgggtgtagcattttgaaaaacccgcaggacaattcctcagttcaccgnttgaaaaaattcttcagngcaaatccactttaaataatangaataatttgaaaaaaaaaaaaaaaaaggnngcctttaaggg

SEQ ID NO: 1856 - DNA, 333 bp, Homo sapiens
  misc_feature (20)..(20): n equals a,t,g, or c
  misc_feature (31)..(31): n equals a,t,g, or c
  misc_feature (34)..(34): n equals a,t,g, or c
  misc_feature (65)..(65): n equals a,t,g, or c
  misc_feature (82)..(82): n equals a,t,g, or c
  misc_feature (88)..(88): n equals a,t,g, or c
  misc_feature (150)..(150): n equals a,t,g, or c
  misc_feature (187)..(187): n equals a,t,g, or c
  misc_feature (202)..(202): n equals a,t,g, or c
  misc_feature (220)..(220): n equals a,t,g, or c
  misc_feature (228)..(228): n equals a,t,g, or c
  misc_feature (240)..(240): n equals a,t,g, or c
  misc_feature (267)..(267): n equals a,t,g, or c
  misc_feature (280)..(281): n equals a,t,g, or c
  misc_feature (308)..(308): n equals a,t,g, or c
ggtacatgtttagactgatntgttaatattngtngagatttgctttatgacctagattataaccngtttctgtaaatgtttnatgatncgcttgaaaagtatgcttgttttttagttgttggatgtccattagaccaaagttgttaattntgtagttcaaattttttccattttactattcttttgncttctacttgatctntcagactctgagatgtgnatgaaatnttctattctagngaacttaccaatttctccctgtaattntgtcaattttagnnctatgtatgtttatatattcagaagtnttgttataaataaataattataaat

SEQ ID NO: 1857 - DNA, 400 bp, Homo sapiens
  misc_feature (9)..(9): n equals a,t,g, or c
  misc_feature (181)..(181): n equals a,t,g, or c
  misc_feature (202)..(202): n equals a,t,g, or c
  misc_feature (206)..(207): n equals a,t,g, or c
  misc_feature (209)..(209): n equals a,t,g, or c
  misc_feature (216)..(216): n equals a,t,g, or c
  misc_feature (244)..(244): n equals a,t,g, or c
  misc_feature (247)..(247): n equals a,t,g, or c
  misc_feature (265)..(265): n equals a,t,g, or c
  misc_feature (267)..(267): n equals a,t,g, or c
  misc_feature (278)..(280): n equals a,t,g, or c
  misc_feature (292)..(292): n equals a,t,g, or c
  misc_feature (324)..(324): n equals a,t,g, or c
  misc_feature (336)..(336): n equals a,t,g, or c
  misc_feature (363)..(363): n equals a,t,g, or c
  misc_feature (398)..(399): n equals a,t,g, or c
gtagaaatnttgctctctgtaccctgaaatcttccactagcctcacttttcaacagagtcatctagaagggagggttggcttcccaaaagcataaccttgaccaaaccaaacaataggcaccagcaatgctgtcattcagttatgcagaagctcatttgtgaaattctgcttctctgattncttcgcaagtctcttaatggncatnngngttagantacatcaaactgatggatagccattggnatncatctattttaactctgngnctataccatannngtttatgatggncacaagtctaaagtacacacgggctgtgactngattcaaaaganaatgttataagatgcagtaaactagtnacagaattattaaaatatatcaggctataaaaaanna

SEQ ID NO: 1858 - DNA, 725 bp, Homo sapiens
  misc_feature (11)..(11): n equals a,t,g, or c
  misc_feature (673)..(673): n equals a,t,g, or c
  misc_feature (705)..(705): n equals a,t,g, or c
  misc_feature (711)..(711): n equals a,t,g, or c
  misc_feature (722)..(722): n equals a,t,g, or c
  misc_feature (725)..(725): n equals a,t,g, or c
gcaagattctnttggccaacttcttggcccagacagaggccctgatgaggggaaaatcgacggaggaggcccgaaaggagctccaggctgcgggcaagagtccagaggaccttgagaggctgctgccacataaggtctttgaaggaaatcgcccaaccaactctattgtgttcaccaagctcacaccattcatgcttggagccttggtcgccatgtatgagcacaagatcttcgttcagggcatcatctgggacatcaacagctttgaccagtggggagtggagctgggaaagcagctggctaagaaaatagagcctgagcttgatggcagtgctcaagtgacctctcacgacgcttctaccaatgggctcatcaacttcatcaagcagcagcgcgaggccagagtccaataaactcgtgctcatctgcagcctcctctgtgactcccctttctcttctcgtccctcctccccggagccggcactgcatgttcctggacaccacccagagcaccctctggttgtgggcttggaccacgagcccttagcagggaaggctggtctcccccagcctaacccccagccctccatgtctatgctccctctgtgttagaattggctgaagtggttttgtgcagctgacttttctgacccatgttcacgttggtcacatnccatgtagaaaaataaagatgccacggaggangttgtnaaaaaaaaaanatn

SEQ ID NO: 1859 - DNA, 497 bp, Homo sapiens
  misc_feature (2)..(2): n equals a,t,g, or c
  misc_feature (175)..(175): n equals a,t,g, or c
  misc_feature (285)..(285): n equals a,t,g, or c
  misc_feature (295)..(295): n equals a,t,g, or c
  misc_feature (313)..(313): n equals a,t,g, or c
  misc_feature (323)..(324): n equals a,t,g, or c
  misc_feature (331)..(331): n equals a,t,g, or c
  misc_feature (395)..(395): n equals a,t,g, or c
  misc_feature (440)..(440): n equals a,t,g, or c
  misc_feature (458)..(458): n equals a,t,g, or c
  misc_feature (464)..(464): n equals a,t,g, or c
  misc_feature (478)..(478): n equals a,t,g, or c
  misc_feature (483)..(483): n equals a,t,g, or c
gnggaaatgaaacatctgtttttgggccaacaggaaacaagactcttggtttagccataaaaagattttattaccccttcaaaccacatttgccaactaaagaatttctgttgagtctcttgcaaatttttgatgcagtgattgtgcacaaacagttctatttgttttataattntgaatattggtttttacctatgaaattcccttttattaaaataacatatgaagaaatccctttacctatcagaaacaaaacactctctggtttataaaacaccttaattntactgctctnttttcttcaatcaccagnatctggtttnnagggggntggattttactttgtgaaatccttaacctttctttctttggagcataaaggtaaaatgcccatnaccagaaatgctgcaaaattaacattttaggactcttcttttggnaaggaacttgaaatttgnactaanattgggccaaagtnaagcnaagttaagtgaact

SEQ ID NO: 1860 - DNA, 666 bp, Homo sapiens
  misc_feature (14)..(14): n equals a,t,g, or c
  misc_feature (26)..(26): n equals a,t,g, or c
  misc_feature (199)..(199): n equals a,t,g, or c
  misc_feature (205)..(205): n equals a,t,g, or c
  misc_feature (264)..(264): n equals a,t,g, or c
  misc_feature (284)..(284): n equals a,t,g, or c
  misc_feature (360)..(360): n equals a,t,g, or c
  misc_feature (381)..(381): n equals a,t,g, or c
  misc_feature (433)..(433): n equals a,t,g, or c
  misc_feature (450)..(450): n equals a,t,g, or c
  misc_feature (468)..(468): n equals a,t,g, or c
  misc_feature (516)..(516): n equals a,t,g, or c
  misc_feature (522)..(522): n equals a,t,g, or c
  misc_feature (531)..(531): n equals a,t,g, or c
  misc_feature (539)..(541): n equals a,t,g, or c
  misc_feature (589)..(589): n equals a,t,g, or c
  misc_feature (601)..(601): n equals a,t,g, or c
  misc_feature (607)..(607): n equals a,t,g, or c
  misc_feature (612)..(612): n equals a,t,g, or c
  misc_feature (633)..(633): n equals a,t,g, or c
gcggccgctcggcnagttctcccagnagaaagccatgttcagttcgagcgccaagatcgtgaagcccaatggcgagaagccggacgagttcgagtccggcatctcccaggctcttctggagctggagatgaactcggacctcaaggctcagctcagggagctgaatattacggcagctaaggaaattgaagttggtggnggtcgnaaagctatcataatctttgttcccgttcctcaactgaaatctttccagaaaatccaagnccggctagtacgcgaattgnagaaaaagttcagtgtgaagcatgtcgtctttatcgctcagaggagaattctgctaagccaactcgaaaaagccgnacaaaaaataagcaaaagcgnccaggagccgtactctgacaggttggcacgatgccatccttgaggacttggncttccaagcgaaattgngggcaagagaatccgcgncaaactagatgtcagcccggttcataaagggtcaattggaccaaggcncagcangaacaatgnggaacacnnnggttgaaactttttctggggggctattaagaaagcttaacgggccaangggttggtaaanttttgnaattncccaaaggttttcaaattggnaaaccaaaaaatgggcttaaaattaaaaagggg

SEQ ID NO: 1861 - DNA, 503 bp, Homo sapiens
  misc_feature (25)..(25): n equals a,t,g, or c
  misc_feature (257)..(257): n equals a,t,g, or c
  misc_feature (338)..(342): n equals a,t,g, or c
  misc_feature (344)..(346): n equals a,t,g, or c
  misc_feature (348)..(348): n equals a,t,g, or c
  misc_feature (358)..(358): n equals a,t,g, or c
  misc_feature (409)..(409): n equals a,t,g, or c
  misc_feature (429)..(429): n equals a,t,g, or c
  misc_feature (479)..(479): n equals a,t,g, or c
  misc_feature (491)..(491): n equals a,t,g, or c
  misc_feature (502)..(502): n equals a,t,g, or c
gcctacctgcattatctcattctgncttccttgataattctgtgggccttgcagctttaactatagctcagctgctgcaagatttcagacttttgaggatgttgtgtgagggtgtttgactgtgactggggaagctcagactactttgtatgtgaatgcttcagggttttctttgttgagaacaactagcaacaaaggcaacccatgtgtgaccagttctccccaaggtctatgctaaattatagcaagagccctgngcaaccccaaacctagtcctggtagctgagcaccctgtaaggcaggagcaggcagctcagcttgagcagacattgggtggnnnnngnnngntggtgaggcnggaggcagcacagtgcagcaaatggttcttgggaggaagaagctgaccatnacatctgcttgctaatgaanctggattcttccttggacctatcctttcgaattggctttaccttcatcancttggacccttncttggccaaana

SEQ ID NO: 1862 - DNA, 706 bp, Homo sapiens
  misc_feature (12)..(13): n equals a,t,g, or c
  misc_feature (622)..(622): n equals a,t,g, or c
  misc_feature (653)..(653): n equals a,t,g, or c
  misc_feature (669)..(669): n equals a,t,g, or c
  misc_feature (674)..(674): n equals a,t,g, or c
  misc_feature (679)..(679): n equals a,t,g, or c
ggcgagcccagnntccggtcccagccccggccgtcccggcgtcgcttcggagcgcggcggcagctgactgcgccttcacgatccgctgggacccgcgagccccgccgccgttatgaacatccgcaatgcgaggccagaggacctaatgaacatgcagcactgcaacctcctctgcctgcccgagaactaccagatgaaatactacttctaccatggcctttcctggccccagctctcttacattgctgaggacgagaatgggaagattgtggggtatgtcctggccaaaatggaagaggacccagatgatgtgccccatggacatatcacctcattggctgtgaagcgttcccaccggcgcctcggtctggctcagaaactgatggaccaggcctctcgagccatgatagagaacttcaatgccaaatatgtctccctgcatgtcaggaagagtaaccgggccgcctgcacctctattccaacaccctcaactttcagatcagtgaagtggagcccaaatactatgcagatggggaggacgcctatgccatgaagcgggacctcactcagatggccgacgagctgaggcggcacctggagctgaaagagaaggcaggcacgnggtgctgggtgccatcgagaacaaggtgganagcaaaggcaattcancttcnagctnaggaaaggccttgtcgcgaggagaagg

SEQ ID NO: 1863 - DNA, 747 bp, Homo sapiens
  misc_feature (72)..(72): n equals a,t,g, or c
  misc_feature (246)..(246): n equals a,t,g, or c
  misc_feature (260)..(260): n equals a,t,g, or c
  misc_feature (263)..(263): n equals a,t,g, or c
  misc_feature (271)..(271): n equals a,t,g, or c
  misc_feature (281)..(281): n equals a,t,g, or c
  misc_feature (310)..(310): n equals a,t,g, or c
  misc_feature (313)..(313): n equals a,t,g, or c
  misc_feature (474)..(474): n equals a,t,g, or c
  misc_feature (506)..(506): n equals a,t,g, or c
  misc_feature (512)..(513): n equals a,t,g, or c
  misc_feature (528)..(528): n equals a,t,g, or c
  misc_feature (569)..(569): n equals a,t,g, or c
  misc_feature (598)..(598): n equals a,t,g, or c
  misc_feature (603)..(603): n equals a,t,g, or c
  misc_feature (605)..(605): n equals a,t,g, or c
  misc_feature (623)..(623): n equals a,t,g, or c
  misc_feature (625)..(626): n equals a,t,g, or c
  misc_feature (671)..(671): n equals a,t,g, or c
  misc_feature (677)..(677): n equals a,t,g, or c
  misc_feature (697)..(697): n equals a,t,g, or c
  misc_feature (734)..(734): n equals a,t,g, or c
  misc_feature (736)..(736): n equals a,t,g, or c
ggtcgttctttgggcggtgctggtttttcgctcgtcgactgcggctcttcctcgggcagcggaagcggcgcnggcggtcggagaagtggcctaaaacttcggcgttgggtgaaagaaaatggcccgaaccaagcagactgctcgtaagtccaccggtgggaaagccccccgcaaacagctggccacgaaagccgccaggaaaagcgctccctctaccggcggggtgaagaaacctcatcggttcanggcccgggaaccgnggnggcttttnagagattcgncggtttcaagaaagtcgacccgagcttgnttnatccggaaacttggccctttccaagaagggttggtagaaggggaaaatcggcgccagggattttcaaaaacccgaccctgaagggttttcaagaagccgcaagcccattcggggtgccgcttgcaaggaagggcttaagcggaaagccggtacccttgggngggggtcttggtttcgaaagaatacccaaccntggtgnngccaattccacggcnttaagaagaagtcaaccaattcaattgcccaaaaggaacantccaagtttggcttcggcccggaataccnggggnangaaggaagaaggcttaangnngaaaaggccaggtttttttaaatgggggtttttggaagtaaaaantcttgngaaaaaaaacctttgggttnaaaattggggacttttttttgggaaggaaaatgggtnanaaaaaaggtgc

SEQ ID NO: 1864 - DNA, 619 bp, Homo sapiens
  misc_feature (7)..(7): n equals a,t,g, or c
  misc_feature (429)..(429): n equals a,t,g, or c
  misc_feature (435)..(435): n equals a,t,g, or c
  misc_feature (550)..(550): n equals a,t,g, or c
  misc_feature (574)..(574): n equals a,t,g, or c
  misc_feature (594)..(594): n equals a,t,g, or c
  misc_feature (597)..(597): n equals a,t,g, or c
  misc_feature (618)..(618): n equals a,t,g, or c
ggggagntccagaaatgccagcttcccaaagcaaagcatgcgagacacaacccaagcagacttctgtagccagcgcaaaccaggtcagcaggaccgagtctcctcaggggttacctacagtccagcgggaaaatgcaaaaaaagttctgaatccacctgcccctgcaggtgaccatgcaaggcttgatggcctgagtaaaatggacacagagaaggctgcctcggcaaatcacgtgaagcccaagcctgaactcacttccatacagggccaaccagcgtccacgtcacaacctctgctgaaggcacattctgaagtttttacaaagccctcaggccagcagactctctctccagacagacaggttcccaggcccacagcactaccgcggaggcagcccactgtgcacttcagcgacgtgagcagcgatnattacnaggacagggcttgtgatagcaacctgatggattttaatttttaatttgcttttttttatataacactttaagggttctttgaaaaccctcctttccttaaagcacaatttttctncataaactcatgactaaactttgngcaatcatgactttttgacnaanaattgtggtttgggcagttcng

SEQ ID NO: 1865 - DNA, 438 bp, Homo sapiens
  misc_feature (19)..(19): n equals a,t,g, or c
  misc_feature (22)..(22): n equals a,t,g, or c
  misc_feature (27)..(27): n equals a,t,g, or c
  misc_feature (273)..(273): n equals a,t,g, or c
  misc_feature (275)..(275): n equals a,t,g, or c
  misc_feature (305)..(305): n equals a,t,g, or c
  misc_feature (329)..(329): n equals a,t,g, or c
  misc_feature (372)..(372): n equals a,t,g, or c
  misc_feature (383)..(383): n equals a,t,g, or c
  misc_feature (403)..(403): n equals a,t,g, or c
  misc_feature (409)..(409): n equals a,t,g, or c
  misc_feature (413)..(413): n equals a,t,g, or c
ggagccccaatgcccagcngcntcacnccatgtcccccacccctgaggatcaggtgagtgctgcacctctgttggctcgtgccttgcactggggtgccaagggctggaggccctgccgctggccttgtcctccttgggcctcacgcccccttcgggggtggccggttctccccatcacctctctggggcagtcacaccacctgttaagcatcaagctaccacagaggctccggccacctgggctccaccagcccaagccccctgggcttccgngngcccttggcttaatcccaattaatggaagnaacttgaacttaagaagcttgggngcttggcggggcttttgggttttggcccaattgttcccaagtngaagccttggnggaaaggttccggaagcagntggggncttnaaagcagcttcgcctgttgacccca

SEQ ID NO: 1866 - DNA, 590 bp, Homo sapiens
  misc_feature (11)..(11): n equals a,t,g, or c
  misc_feature (263)..(263): n equals a,t,g, or c
  misc_feature (272)..(272): n equals a,t,g, or c
  misc_feature (286)..(286): n equals a,t,g, or c
  misc_feature (298)..(298): n equals a,t,g, or c
  misc_feature (371)..(371): n equals a,t,g, or c
  misc_feature (406)..(406): n equals a,t,g, or c
  misc_feature (418)..(418): n equals a,t,g, or c
  misc_feature (436)..(436): n equals a,t,g, or c
  misc_feature (461)..(461): n equals a,t,g, or c
  misc_feature (486)..(486): n equals a,t,g, or c
  misc_feature (490)..(490): n equals a,t,g, or c
  misc_feature (526)..(526): n equals a,t,g, or c
  misc_feature (550)..(550): n equals a,t,g, or c
  misc_feature (563)..(563): n equals a,t,g, or c
  misc_feature (566)..(567): n equals a,t,g, or c
gcccacgcgtncgcccacgcgtccgcccacgcgtccgcaaagttcaagttaggagcttttaggatgtgggagtaaaactttaatgggaggggagggctggctgctggaagaaggaagaagccagactggttagacagtactcttaactcctagcccagcctagcgtgccctgcccctctggccactgctgcagacacctgccttaacacacacacctctaggactccacagttttgccttaaaggacctttcccaggcttccnttaaaaagngggagatacttgtngaattgggtggngggaatgagcatgaactggcctttcatttgggatatgtacattagagtgagagagaagaataaggggcctttnttatggaagaaatgggagaagagagacaggggttnttttcacagagnctaagaagtttctcttgnaggcaaaatatctaaaaaggctaanctggccacccacttccttaaaatgnttgngagaatggccctaatttgggctcttctggcttgcantggggcaccggccttggttttaancccggaaataaanggnnaattggattggaattgccaaaaa

SEQ ID NO: 1867 - DNA, 501 bp, Homo sapiens
  misc_feature (495)..(495): n equals a,t,g, or c
  misc_feature (498)..(501): n equals a,t,g, or c
ggccccatcttgatgggccaagggctaaacatgcatgtgtcagtggctttggagcaggctaggctggggctcatcgagggtctcaggccgaggccactgcagtgccagtgcccccctgaggactagggcaggcagctgggggcacttggttccatggagcctggataaacagtgctttggaggctctggacagctgtgtggtgtttgtgtcttaactatgcactgggcccttgtctgcgtcggcttgcatacagagggcccctggggtcggccctccggcctgcctcagccagtgggatggacaggggccaggcaggcctctgaacttccacctcctggggcctccagacctcctgtgcccccacctgtgtggcaggtggccagtcttcgggtgatgggaccaaaccccttcagttcagtagagaaaggctaggtcctctacaaagagctgcaagacaaaaattaaaataaatgctccccaccctaaaaaaaagnaannnn

SEQ ID NO: 1868 - DNA, 691 bp, Homo sapiens
  misc_feature (8)..(8): n equals a,t,g, or c
  misc_feature (258)..(259): n equals a,t,g, or c
  misc_feature (285)..(285): n equals a,t,g, or c
  misc_feature (302)..(302): n equals a,t,g, or c
  misc_feature (352)..(352): n equals a,t,g, or c
  misc_feature (364)..(364): n equals a,t,g, or c
  misc_feature (423)..(423): n equals a,t,g, or c
  misc_feature (435)..(435): n equals a,t,g, or c
  misc_feature (465)..(465): n equals a,t,g, or c
  misc_feature (501)..(501): n equals a,t,g, or c
  misc_feature (534)..(534): n equals a,t,g, or c
  misc_feature (549)..(549): n equals a,t,g, or c
  misc_feature (573)..(573): n equals a,t,g, or c
  misc_feature (575)..(575): n equals a,t,g, or c
  misc_feature (580)..(581): n equals a,t,g, or c
  misc_feature (610)..(610): n equals a,t,g, or c
  misc_feature (659)..(661): n equals a,t,g, or c
  misc_feature (669)..(669): n equals a,t,g, or c
gcagtctnagtagctggaagcgaaccacagtgttgaggggagcccgctgggaagaggggactcgggaggacagccctggatactaccagagtgacagatggctgtggctgcagggcaaagagatcccctgcagttctgggttggccacagggagcccaggacacccgccttcatgcctctgctgtgagacccagcaaagcagggcccatgaccactagggcctgggctgaccctgactcataacaggacaatgacggnntggggaggcatcccatccagcctcanagggcccaaagaatggntgagcaggacagtgggagaccagaccctaccccgcaactccagtaagcanggcactgcccanggagactgccttcagaaacctgagcttcagcggacaacaccccccatcccctgcgcatncttgtctcattnggggactggtggagctggcttagaggttgnggtagtttcctggttacaggggtccacaagaccctntctcatccggataggggcctctcttctctcatnggcctgataagggantggccaggcttgtgtgcatcctgnanagggnnggaagtcagcttggccaaccggcattcancttggcaagagcttgggcccattttggcaggccccgggtatcaatctgnnngcttgctncccgggcccaggaaagggttgg

SEQ ID NO: 1869 - DNA, 735 bp, Homo sapiens
  misc_feature (526)..(526): n equals a,t,g, or c
  misc_feature (584)..(584): n equals a,t,g, or c
  misc_feature (600)..(600): n equals a,t,g, or c
  misc_feature (603)..(603): n equals a,t,g, or c
  misc_feature (619)..(619): n equals a,t,g, or c
  misc_feature (621)..(621): n equals a,t,g, or c
  misc_feature (659)..(659): n equals a,t,g, or c
  misc_feature (679)..(679): n equals a,t,g, or c
  misc_feature (681)..(681): n equals a,t,g, or c
  misc_feature (704)..(704): n equals a,t,g, or c
  misc_feature (707)..(707): n equals a,t,g, or c
gcaacagagagaagatgactcagattatgtttgagaccttcaacaccccggccatgtacgtggccatccaggccgtgctgtccctctacgcctctgggcgcaccactggcattgtcatggactctggagacggggtcacccacacggtgcccatctacgagggctacgccctcccccacgccatcctgcgtctggacctggctggccgggacctgaccgactacctcatgaagatcctcactgagcgaggctacagcttcaccaccacggccgagcgggaaatcgtgcgcgacatcaaggagaagctgtgctacgtcgccctggacttcgagcaggagatggccaccgccgcatcctcctcttctctggagaagagctacgagctgcccgatggccaggtcatcaccattggcaatgagcggttccggtgtccggaggcgctgtccagccttcctttctgggtatggaatcttgcggcatccacgagaccaccttcaactccatcatgaagtgtgacgtggacatncgcaaagacctgtacgccaacacggtgctttcgggcgggaccaccatgtatccggcantgcttacaggatgcanaangagataccggcctggngnccaagaaccattgaagattaagatcattggaacccccngaagcggcaaggacttcggngngggaatcgggggggtttccattnctnggggctttaattgggccccccttttccc

SEQ ID NO: 1870 - DNA, 564 bp, Homo sapiens
  misc_feature (10)..(10): n equals a,t,g, or c
  misc_feature (100)..(100): n equals a,t,g, or c
  misc_feature (269)..(269): n equals a,t,g, or c
  misc_feature (273)..(273): n equals a,t,g, or c
  misc_feature (317)..(317): n equals a,t,g, or c
  misc_feature (497)..(497): n equals a,t,g, or c
  misc_feature (532)..(532): n equals a,t,g, or c
  misc_feature (542)..(542): n equals a,t,g, or c
  misc_feature (545)..(545): n equals a,t,g, or c
  misc_feature (552)..(552): n equals a,t,g, or c
ggccctgccnagctcccggaccagaagcagctgcgctacacggaggaactgctgcggcacgtggcccctgggttgcacctggagcttcgggggccacagntgtgggcccggcgcatgggcaagtgcaaggtgtactgggaggtgggcggacccccaggctccgccagcccctccaccccagcctgcctgctgcctcggaactgtgacacccccatcttcgacttcagagtcttcttccaaggtcaagtgaggcccttggcttggggggntggnttcaaggggtcccttgggaagcacctgccttgccaggtacttancaagaagtccccttcttcagaactggtggaattccggcacggagcgccgtggctccccacgctataccatctacctgggcttcgggcaggacctgtcagcttgggaggcccaaggagaagacctggtcctggtgaagctggaaccctggttgtgccaatgcacctagagggcacgcacgngaaggtgggcttcctggatagacaagcttagcctntgctgtcagngcnacagctntatacacttgag

SEQ ID NO: 1871 - DNA, 551 bp, Homo sapiens
  misc_feature (3)..(3): n equals a,t,g, or c
  misc_feature (6)..(6): n equals a,t,g, or c
  misc_feature (8)..(8): n equals a,t,g, or c
  misc_feature (21)..(21): n equals a,t,g, or c
  misc_feature (23)..(23): n equals a,t,g, or c
  misc_feature (145)..(145): n equals a,t,g, or c
  misc_feature (148)..(148): n equals a,t,g, or c
  misc_feature (150)..(150): n equals a,t,g, or c
  misc_feature (161)..(161): n equals a,t,g, or c
  misc_feature (216)..(216): n equals a,t,g, or c
  misc_feature (225)..(225): n equals a,t,g, or c
  misc_feature (239)..(239): n equals a,t,g, or c
  misc_feature (284)..(284): n equals a,t,g, or c
  misc_feature (308)..(308): n equals a,t,g, or c
  misc_feature (311)..(311): n equals a,t,g, or c
  misc_feature (313)..(313): n equals a,t,g, or c
  misc_feature (341)..(341): n equals a,t,g, or c
  misc_feature (350)..(350): n equals a,t,g, or c
  misc_feature (362)..(362): n equals a,t,g, or c
  misc_feature (370)..(370): n equals a,t,g, or c
  misc_feature (415)..(415): n equals a,t,g, or c
  misc_feature (428)..(428): n equals a,t,g, or c
  misc_feature (459)..(459): n equals a,t,g, or c
  misc_feature (516)..(516): n equals a,t,g, or c
  misc_feature (518)..(518): n equals a,t,g, or c
  misc_feature (536)..(536): n equals a,t,g, or c
  misc_feature (539)..(539): n equals a,t,g, or c
aanaangnctggactgtgaanancaataccttcaactccatcatgaagtgtgacgtggacatccgcaaagacctgtacgccaacacagtgctgtctggcggcaccaccatgtaccctggcattgccgacaggatgcacaaagggnaantncttgccctggnacccagcacaattgaaagaatcaagaataattggttcctccttgaacggcaaggnactcccggngtgggaatcgggcnggcttccaatcccttgggcccttcgctttgtccaaccctttccangcaagaatggtggggaatcaagcnaangncaagggaagtaattgaaccgaaggtccngggcccccntcccattcgtcnccaccggnaaaaatggctttcttaagggcggggaacttaatgaactttaagtntggcggtttaacnaccccctttttctttggaccaaaaaaccctnaactttgcggcaagaaaaaaacaagaatgaagaattgggcatgggctttaatttggntntttttggtttggtttggnttntctttttttttt

SEQ ID NO: 1872 - DNA, 792 bp, Homo sapiens
  misc_feature (137)..(137): n equals a,t,g, or c
  misc_feature (154)..(154): n equals a,t,g, or c
  misc_feature (351)..(351): n equals a,t,g, or c
  misc_feature (446)..(446): n equals a,t,g, or c
  misc_feature (501)..(501): n equals a,t,g, or c
  misc_feature (529)..(529): n equals a,t,g, or c
  misc_feature (630)..(630): n equals a,t,g, or c
  misc_feature (679)..(679): n equals a,t,g, or c
  misc_feature (681)..(682): n equals a,t,g, or c
  misc_feature (686)..(686): n equals a,t,g, or c
  misc_feature (697)..(697): n equals a,t,g, or c
  misc_feature (729)..(729): n equals a,t,g, or c
  misc_feature (734)..(734): n equals a,t,g, or c
  misc_feature (750)..(750): n equals a,t,g, or c
  misc_feature (753)..(754): n equals a,t,g, or c
  misc_feature (760)..(760): n equals a,t,g, or c
  misc_feature (775)..(775): n equals a,t,g, or c
  misc_feature (789)..(789): n equals a,t,g, or c
ggtgaacaggacccgtcgccatgggccgtgtgatccgtggacagaggaagggcgccgggtctgtgttccgcgcgcacgtgaagcaccgtaaaggcgctgcgcgcctgcgcgctgtggatttcgctgagcggcacggntacatcaagggcatcgncaaggacatcatccacgacccgggccgcgacgcgcccctcgccaaggtggtcttccgggatccgtatcggtttaagaagcaggacggagccgttcattgccgccgagggcattcacacgggccatgtttgtgtattgcggcaagaaggcccagctcaacattggcaatgtgctccctgtgggcaccatgcctgaggntacaatcgtgtgctgcctggaggagaagcctggagaccgtggcaagctggcccgggcatcagggaactatgccaccgttatctcccacaaccctnagaccaagaagacccttgtgaagctgccctccggctccaagaaggttatctcctnaccaacagagctgtggttggtgtggtgnctggaggtggccgaattgacaaacccatcttgaaggctgccgggccgtaccacaaatataaggcaaagaaggaactgctggccaccaataccgggtgtggncattgaatccctgtggaagcaatcctttttggaggtggcaaaccacccngnntatnggggagagccnttcacccattccgcaagaagatgccccttggntgggncccgaaaaaggggggnctnnaattgnttcccccgccggaanttggaacttttccnggg

SEQ ID NO: 1873 - DNA, 525 bp, Homo sapiens
  misc_feature (520)..(520): n equals a,t,g, or c
gggtgaatcctggatttggacctagattgggctggctctaaagccaggcttctttcccctgctccactcttggaataaatgaaggattgttggttcaggatatgcagaaagctgcttagcaaaaggagagttggagaagcatcttggtttgagggtcttgaaggacacctactgtactcccagctgagaggactctttctcctcatcttcaggaggatgcctccagagcctggggttactgtaggcctttgccagaggcatgttcggacttagccagctgagtatcccctgtttcctgcttttaccatctcagctgctggtcaggaggtttgggaaggtgacatcatctagctgaatcagctgctgcttctagatacattactggaactgaaagtcattaccccttccttcctgctctgcaagtctcttcagaatgaggctggagtatgggtgttccacctgtctgcagggtcatgactggaatggtacttgctgcttttaaagagctaaaaggttttanaagct

SEQ ID NO: 1874 - DNA, 591 bp, Homo sapiens
  misc_feature (54)..(54): n equals a,t,g, or c
  misc_feature (110)..(110): n equals a,t,g, or c
  misc_feature (273)..(273): n equals a,t,g, or c
  misc_feature (303)..(303): n equals a,t,g, or c
  misc_feature (390)..(390): n equals a,t,g, or c
  misc_feature (411)..(411): n equals a,t,g, or c
  misc_feature (469)..(469): n equals a,t,g, or c
  misc_feature (519)..(519): n equals a,t,g, or c
  misc_feature (551)..(551): n equals a,t,g, or c
  misc_feature (557)..(557): n equals a,t,g, or c
  misc_feature (568)..(568): n equals a,t,g, or c
  misc_feature (579)..(579): n equals a,t,g, or c
gcccgcctgccggtaccggtccggaattcccgggtcgacccacgctttcggacntattaagttcaatgtatgggacacagccggccaggagaaattcggtgcactgaganatggctattatatccaagcccagtgtgccatcataatgtttgatgtaacatcgagagttacttacaagaatgtgcctaactggcatagagatctggtacgagtgtgtgaaaacatccccattgtgttgtgtggcaacaaagtggatattaaggacaggaaagngaaggcgaaatccattgtcttccaccgaangaagaatcttcagtactacgacatttctgccaaaagtaactacaactttgaaaagcccttcctctggcttgctaggaagctcattgnagaccctaacttggaatttgntgccatgcctgcgctcgccccaccagaagttgtcatggacccagctttgcagcacagnatgagcacgacttagaggttgctcagacaactgctctcccggatgaggangatgacctgtgagaatgaagcttggagcccangcggcnagaagtctagnttttataggcnggctgtccttgg

SEQ ID NO: 1875 - DNA, 255 bp, Homo sapiens
  misc_feature (33)..(33): n equals a,t,g, or c
  misc_feature (58)..(58): n equals a,t,g, or c
  misc_feature (61)..(61): n equals a,t,g, or c
  misc_feature (86)..(86): n equals a,t,g, or c
  misc_feature (95)..(95): n equals a,t,g, or c
  misc_feature (122)..(122): n equals a,t,g, or c
  misc_feature (130)..(130): n equals a,t,g, or c
  misc_feature (173)..(173): n equals a,t,g, or c
  misc_feature (211)..(211): n equals a,t,g, or c
  misc_feature (238)..(238): n equals a,t,g, or c
  misc_feature (248)..(248): n equals a,t,g, or c
  misc_feature (253)..(253): n equals a,t,g, or c
tcgggcatacactctgcggaggaatgcctcccnctacgaggcctccagcctctatggnatntcagccatggatggggactcccttnacactacanccacgattggagggcaagagctgcagncccatggncttctctgcttagcggggacctgaccatcacgtctctgggagnacattgaggaggagtataactacaggcgttcgagcagnagaagaccgaggctgcccgactgcccnacagcggatnatagncc

SEQ ID NO: 1876 - DNA, 360 bp, Homo sapiens
  misc_feature (6)..(6): n equals a,t,g, or c
  misc_feature (95)..(95): n equals a,t,g, or c
  misc_feature (113)..(113): n equals a,t,g, or c
  misc_feature (116)..(116): n equals a,t,g, or c
  misc_feature (150)..(150): n equals a,t,g, or c
  misc_feature (161)..(161): n equals a,t,g, or c
  misc_feature (168)..(168): n equals a,t,g, or c
  misc_feature (180)..(180): n equals a,t,g, or c
  misc_feature (196)..(196): n equals a,t,g, or c
  misc_feature (227)..(227): n equals a,t,g, or c
  misc_feature (252)..(252): n equals a,t,g, or c
  misc_feature (279)..(279): n equals a,t,g, or c
  misc_feature (289)..(289): n equals a,t,g, or c
  misc_feature (329)..(329): n equals a,t,g, or c
  misc_feature (334)..(334): n equals a,t,g, or c
  misc_feature (342)..(342): n equals a,t,g, or c
gcagangcgagatgacgaagggaacgtcatcgtttggaaagcgtcgcaataagacgcacacgttgtgccgccgctgtggctctaaggcctaccancttcagaagtcgacctgnggnaaatgtggctaccctgccaagcgcaagagaaagnataactggagngcaaggntaaaagacgaanataccaccggaactgntcgaatgaggcacctaaaaattgtataccgnagattcaggcatggattccgtgaangaacaacacctaaacccaagagggcanctgttgcagnatccagttcatcttaagaatgtcaacgattagtcatgcantaaangttctggntttaaaataatattaaac

SEQ ID NO: 1877 - DNA, 424 bp, Homo sapiens
  misc_feature (7)..(7): n equals a,t,g, or c
  misc_feature (373)..(373): n equals a,t,g, or c
  misc_feature (388)..(388): n equals a,t,g, or c
  misc_feature (397)..(397): n equals a,t,g, or c
  misc_feature (422)..(423): n equals a,t,g, or c
gggccgnagaagcgagatgacgaagggaacgtcatcgtttggaaagcgtcgcaataagacgcacacgttgtgccgccgctgtggctctaaggcctaccaccttcagaagtcgacctgtggcaaatgtggctaccctgccaagcgcaagagaaagtataactggagtgccaaggctaaaagacgaaataccaccggaactggtcgaatgaggcacctaaaaattgtataccgcagattcaggcatggattccgtgaaggaacaacacctaaacccaagagggcagctgttgcagcatccagttcatcttaagaatgtcaacgattagtcatgcaataaatgttctggttttaaaaaataaaaaaaaaaaaaaanggggggccgttttanaggatccangtttacgtacgcgggcatgcaacgnna

SEQ ID NO: 1878 - DNA, 718 bp, Homo sapiens
  misc_feature (173)..(173): n equals a,t,g, or c
  misc_feature (359)..(359): n equals a,t,g, or c
  misc_feature (396)..(396): n equals a,t,g, or c
  misc_feature (564)..(564): n equals a,t,g, or c
  misc_feature (581)..(581): n equals a,t,g, or c
  misc_feature (640)..(640): n equals a,t,g, or c
  misc_feature (647)..(647): n equals a,t,g, or c
  misc_feature (657)..(657): n equals a,t,g, or c
  misc_feature (670)..(670): n equals a,t,g, or c
  misc_feature (716)..(716): n equals a,t,g, or c
ggcttggggccctgcagggagatggaccccttccagcagagctggaggagctgaggaaccgggtgcgggcaggtcctaagaaagagagctgggtcgtcgtcaaggagacacacgaagtgttggacatgctgttcccaaagttcttgaaaggactgcaggatgccggctggaanaccgagaagcaccagctagaggtggatgagtggagggccacatggcttctgtctcccgaaaagaaggtcttgtgagcagcccagacggaggcccaagcccagggcaggaacctggagcaaggacactttggccacagcaggacaggggaaaggcagctttatttttccttagggcaactgcagcgngtgggccaggccctcatgggaagtgactgccaatcanatgcagtgggccccaggcagaggaaggccgggagaaggggagccaggaccttctcaccccactgcccttccccttttctggggagcaccgcaagctcctacccccacttcctgtgaggctgtggcttatggtgtccaacgcaattggtcttaggcatagaaaccccanaggaacacgggcactgncatcatgagcagggcaattgaggttgaccacacgggcccagctcgggtcctcgctatgncctccancccgcctggnttgttgccgctgncttcttcctgggtaaagggccggaggactggccaacccaacttttntt

SEQ ID NO: 1879 - DNA, 660 bp, Homo sapiens
  misc_feature (417)..(417): n equals a,t,g, or c
  misc_feature (449)..(449): n equals a,t,g, or c
  misc_feature (455)..(455): n equals a,t,g, or c
  misc_feature (535)..(535): n equals a,t,g, or c
  misc_feature (554)..(554): n equals a,t,g, or c
  misc_feature (596)..(596): n equals a,t,g, or c
  misc_feature (606)..(606): n equals a,t,g, or c
  misc_feature (650)..(650): n equals a,t,g, or c
  misc_feature (656)..(656): n equals a,t,g, or c
  misc_feature (660)..(660): n equals a,t,g, or c
gtgaacttctaagctgctttctctgttttaagggctgcacaaagatgttcagggataactcggccatgagaaaacatctgcacacccacggtcccagagtccacgtctgtgcagaatgtggcaaagcttttgttgagagttcaaaactaaaacgacaccaactggttcatactggagagaagccctttcagtgcacgttcgaaggctgtgggaaacgcttttcactggacttcaatttgcgcacacatgtgcgaatccataccggagacaggccctatgtgtgccccttcgatggttgtaataagaagtttgctcaagtcaactaacctgaaatctcacatcttaacacatgctaaggccaaaaacaaccagtgaaaagaagagagaagacccttctcgaccacgggaagcatcttncagaaatgtgattgggaataaatatgcctctnctttgnatattatttctaggaagaaatttaaaaatgaatcctacacacctaagggacatggttttgataaagtagtaaaaattaanaaaaaaaaactttactaanatgacattgcttaaaagctctatcttggctctggaaacccgnttcaaaaacncaggggttttttaaaaggggggccccaacaggggggccaatttngggacntttn

SEQ ID NO: 1880 - DNA, 741 bp, Homo sapiens
  misc_feature (628)..(628): n equals a,t,g, or c
  misc_feature (671)..(671): n equals a,t,g, or c
  misc_feature (680)..(680): n equals a,t,g, or c
  misc_feature (701)..(701): n equals a,t,g, or c
  misc_feature (717)..(717): n equals a,t,g, or c
  misc_feature (722)..(722): n equals a,t,g, or c
  misc_feature (735)..(735): n equals a,t,g, or c
ggtggagctgtgcgatgctgctgggcgaccggatcaggaggtggcacaggaggcatggcaaaaccacaaacggcggaacgattctgtgatcgtggacactttccacggcctcttcaagtccacgctggtgtgccccgattgtggcaatgtatctgtgaccttcgaccccttctgctacctcagtgttccactgcctatcagccacaagagggtcttggaggtcttctttatccccatggatccgcgccgcaagccagagcagcaccggctcgtggtccccaagaaaggcaagatctcggatctatgtgtggctctgtccaaacacacgggcatctcgccagagaggatgatggtggctgatgtcttcagtcaccgcttctataagctctatcagctagaggagcctctgagcagcatcttggaccgtgatgatatcttcgtctatgaggtgtcaggtcgcattgaggccattgagggctcaagagaggacatcgtggttcctgtctacctgcgggagcgcacccctgcccgtgactaccacaactcctactacggcctgatgctttttggacaccccctcctggtatcagtgccccgggaccgcttacctgggaggcctgtataacgnctgatgtaccggtctcacgctcgtgaccaaacccaactaaatnatgaggacnattgggatgagaaagaagatnaccaggaggattaagnaaacntccctgggccctnaacttg

SEQ ID NO: 1881 - DNA, 767 bp, Homo sapiens
  misc_feature (23)..(23): n equals a,t,g, or c
  misc_feature (49)..(49): n equals a,t,g, or c
  misc_feature (133)..(133): n equals a,t,g, or c
  misc_feature (148)..(148): n equals a,t,g, or c
  misc_feature (161)..(161): n equals a,t,g, or c
  misc_feature (236)..(236): n equals a,t,g, or c
  misc_feature (239)..(239): n equals a,t,g, or c
  misc_feature (255)..(255): n equals a,t,g, or c
  misc_feature (298)..(298): n equals a,t,g, or c
  misc_feature (345)..(345): n equals a,t,g, or c
  misc_feature (347)..(347): n equals a,t,g, or c
  misc_feature (369)..(369): n equals a,t,g, or c
  misc_feature (378)..(378): n equals a,t,g, or c
  misc_feature (416)..(416): n equals a,t,g, or c
  misc_feature (420)..(421): n equals a,t,g, or c
  misc_feature (440)..(440): n equals a,t,g, or c
  misc_feature (443)..(443): n equals a,t,g, or c
  misc_feature (447)..(447): n equals a,t,g, or c
  misc_feature (452)..(452): n equals a,t,g, or c
  misc_feature (498)..(498): n equals a,t,g, or c
  misc_feature (504)..(504): n equals a,t,g, or c
  misc_feature (506)..(506): n equals a,t,g, or c
  misc_feature (508)..(508): n equals a,t,g, or c
  misc_feature (511)..(511): n equals a,t,g, or c
  misc_feature (513)..(513): n equals a,t,g, or c
  misc_feature (541)..(541): n equals a,t,g, or c
  misc_feature (545)..(545): n equals a,t,g, or c
  misc_feature (573)..(573): n equals a,t,g, or c
  misc_feature (576)..(576): n equals a,t,g, or c
  misc_feature (580)..(580): n equals a,t,g, or c
  misc_feature (594)..(594): n equals a,t,g, or c
  misc_feature (598)..(599): n equals a,t,g, or c
  misc_feature (601)..(601): n equals a,t,g, or c
  misc_feature (616)..(616): n equals a,t,g, or c
  misc_feature (619)..(619): n equals a,t,g, or c
  misc_feature (623)..(623): n equals a,t,g, or c
  misc_feature (634)..(635): n equals a,t,g, or c
  misc_feature (643)..(643): n equals a,t,g, or c
  misc_feature (649)..(649): n equals a,t,g, or c
  misc_feature (651)..(651): n equals a,t,g, or c
  misc_feature (657)..(657): n equals a,t,g, or c
  misc_feature (667)..(667): n equals a,t,g, or c
  misc_feature (674)..(674): n equals a,t,g, or c
  misc_feature (676)..(677): n equals a,t,g, or c
  misc_feature (679)..(679): n equals a,t,g, or c
  misc_feature (710)..(710): n equals a,t,g, or c
  misc_feature (734)..(734): n equals a,t,g, or c
  misc_feature (740)..(740): n equals a,t,g, or c
  misc_feature (743)..(743): n equals a,t,g, or c
gcttgctgtgagtgtctctaggntgatacgtgggtgagaaaggtcctgntccgcgccagagcccagcgcgcctcgtcgccatgcctcggaaaattgaggaaatcaaggacttcctgctcacagcccgactaanggatgccaaatctgncaagatcaagaanaataaggacaacgtgaagtttaaagttcgatgcagcagatacctttacaccctggtcatcactgacaaagagaangcngagaaactgaagcagnccctgccccccggtttggcagtgaaggaactgaaatgaaccanacacactgattggaactgtattatattaatgatactaataatcctangngtctttcgactttgcggatggnaaagggaanaatgctacctcgtaagggcttttgaagggaacaggacncggnntctgtgctggctttctggnctntttntttgntttctttttttgaaccgaatttggtttggggttaactggacccaangggganananagntnattacaacttccctccgggttaagcatntccngctaacctccaggggttgaaaacgggcnaanaccncccggccaatttgntttnntnaaaacgggttaatgnggntaanccccaaaggtnnaaaagggnaacctngnccgggntcccaatttncataatnanngnaaaggccctttttaccttttaaaaattgggngctttggaaaccgggtaaaaattnaaatgncangggccccttaagccaaggccaggt

SEQ ID NO: 1882 - DNA, 652 bp, Homo sapiens
  misc_feature (451)..(451): n equals a,t,g, or c
  misc_feature (460)..(460): n equals a,t,g, or c
  misc_feature (474)..(474): n equals a,t,g, or c
  misc_feature (581)..(581): n equals a,t,g, or c
  misc_feature (619)..(619): n equals a,t,g, or c
  misc_feature (631)..(631): n equals a,t,g, or c
  misc_feature (635)..(635): n equals a,t,g, or c
  misc_feature (648)..(648): n equals a,t,g, or c
gcccaggctgagacagggtctggaacagaatctgacagtgatgaatcagtaccagagcttgaagaacaggattccacccaggcaaccacacaacaagcccagctggcggcagcagctgaaattgatgaagaaccagtcagtaaagcaaaacagagtcggagtgaaaagaaggcacggaaggctatgtccaaactgggtcttcggcaggttacaggagttactagagtcactatccggaaatctaagaatatcctctttgtcatcacaaaaccagatgtctacaagagccctgcttcagatacttacatagtttttggggaagccaagatcgaagatttatcccagcaagcacaactagcagctgctgagaaattcaaagttcaaggtgaagctgtctcaaacattcaagaaaacacacagacttcactgtccagaagaaaatgaaaagaanaagtcgttnaaccaggttagaanttaaggacattgaattggcatgtacagcaaatgtgtcgagagcaaaggcagtccgagccctgaagacacagtaatgatattggaatgcgattatggaattaacatgnaaccttatggaagcactttttttggggctcaaaggagnactgcacttggnttgnaattggctggttnttta

SEQ ID NO: 1883 - DNA, 625 bp, Homo sapiens
  misc_feature (436)..(436): n equals a,t,g, or c
  misc_feature (441)..(441): n equals a,t,g, or c
  misc_feature (512)..(512): n equals a,t,g, or c
  misc_feature (529)..(529): n equals a,t,g, or c
  misc_feature (594)..(594): n equals a,t,g, or c
  misc_feature (605)..(605): n equals a,t,g, or c
  misc_feature (607)..(607): n equals a,t,g, or c
  misc_feature (622)..(622): n equals a,t,g, or c
gcccacgcgtccggtgaccctcgccatggtaaatacatggcttgctgcctgttgtaccgtggtgacgtggttcccaaagatgtcaatgctgccattgccaccatcaaaaccaagcgcagcatccagtttgtggattggtgccccactggcttcaaggttggcatcaactaccagcctcccactgtggtgcctggtggagacctggccaaggtacagagagctgtgtgcatgctgagcaacaccacagccattgctgaggcctgggctcgcctggaccacaagtttgacctgatgtatgccaagcgtgcctttgttcactggtacgtgggtgaggggatggaggaaggcgagttttcagaggcccgtgaagatatggctgccttgagaaggattatgaggaggttggtgtggattctgttgaagaaaagtgaagaanaaggnaggattctaattatccttcctttggccctgacatgtatgttccaaattcacttagttactgcagacgtaantttggtaatgttactgngaatgcttctggactgaatttctaattaagaagctactaaaaaaaaaaaaaagggccttaaaccnttaacggtcantnattttggccaatatngcg

SEQ ID NO: 1884 - DNA, 773 bp, Homo sapiens
  misc_feature (667)..(667): n equals a,t,g, or c
  misc_feature (715)..(715): n equals a,t,g, or c
  misc_feature (742)..(742): n equals a,t,g, or c
  misc_feature (764)..(764): n equals a,t,g, or c
  misc_feature (766)..(766): n equals a,t,g, or c
  misc_feature (768)..(768): n equals a,t,g, or c
gtggaatattagatattattttgcatctgtaactaaccgtgatcatcatttcttgtaatttcttgtacatgtatattacttgttcttaatagatttttggaaacaagactttattgagatcagtttggttttcctgttaatttacctgtttgactttataatgtgttttagttttgcagaagaacactgttgtagtttagaaggcttttcataaatcccctcataggcaaagatgaaaacttcccactatttttttcccctcttaggaagacatactggaaagaaaatgtttagcatcttagtgtagtatagctattgtaaacagttcatgactagattttgattcggaaatctatactgaccaaggattaatcttaaggattgtataattcattaaagctgtggtctttccatgtggagactgatagaaaataattttgtcccaagtcttatttgctgactttttctgtcatgagtgagattgttgaacaaactgaatatatgggctatagcaagtagctttacagtacagatcttacaattaagttttgcttttggtaaagtgtgtaccattttttctggttggagtaagacaaaaattgttttgacataggttccctagggtacacttgctctagcatactttaaaggccactggttgcaaagnctacattttatgctgaatctgcattctgcaggcacccgtagaaagganctcatacatgctttgcactctccttgnttcctttttccaattcttatgncnancaatt

SEQ ID NO: 1885 - DNA, 779 bp, Homo sapiens
  misc_feature (523)..(523): n equals a,t,g, or c
  misc_feature (525)..(525): n equals a,t,g, or c
  misc_feature (639)..(639): n equals a,t,g, or c
  misc_feature (666)..(666): n equals a,t,g, or c
  misc_feature (672)..(672): n equals a,t,g, or c
  misc_feature (692)..(692): n equals a,t,g, or c
  misc_feature (702)..(702): n equals a,t,g, or c
  misc_feature (716)..(716): n equals a,t,g, or c
  misc_feature (744)..(744): n equals a,t,g, or c
  misc_feature (757)..(757): n equals a,t,g, or c
  misc_feature (763)..(763): n equals a,t,g, or c
  misc_feature (769)..(769): n equals a,t,g, or c
  misc_feature (777)..(777): n equals a,t,g, or c
gcccacgcgtccgggaatcttgcggcatccacgagaccaccttcaactccatcatgaagtgtgacgtggacatccgcaaagacctgtacgccaacacggtgctgtcgggcggcaccaccatgtatccgggcattgctgacaggatgcagaaggagatcaccgccctggcgcccagcaccatgaagatcaagatcatcgcacccccagagcgcaagtactcggtgtggatcggtggctccatcctggcctcactgtccaccttccagcagatgtggattagcaagcaggagtacgacgagtcgggcccctccatcgtccaccgcaaatgcttctaaacggactcagcagatgcgtagcatttgctgcatgggttaattgagaatagaaatttgcccctggcaaatgcacacacctcatgctagcctcacgaaactggaataagccttcgaaaagaaattgtccttgaagcttgtatctgatatcagcactggattgtagaacttggtgctgattttgaccttgnantgaagttaactggtccccttggtattaacgtgtcaagggcttgagtgggtctgggatttctcttagaggcttggcaaggaaccagttggtttggctttgcgggtctgtcagggnttggaaaaggtccaagcccgtaagganccaagntttcctttcttaagcttaanggcctttggnccagaaacacccgnggggctggtacttggcttttgagttggnaagcggtttgcantttacncctggnaaagggantc

SEQ ID NO: 1886 - DNA, 744 bp, Homo sapiens
  misc_feature (522)..(522): n equals a,t,g, or c
  misc_feature (637)..(637): n equals a,t,g, or c
  misc_feature (657)..(657): n equals a,t,g, or c
  misc_feature (679)..(679): n equals a,t,g, or c
  misc_feature (703)..(703): n equals a,t,g, or c
  misc_feature (721)..(721): n equals a,t,g, or c
  misc_feature (744)..(744): n equals a,t,g, or c
ggtactattagccatggtcaaccccaccgtgttcttcgacattgccgtcgacggcgagcccttgggccgcgtctcctttgagctgtttgcagacaaggtcccaaagacagcagaaaattttcgtgctctgagcactggagagaaaggatttggttataagggttcctgctttcacagaattattccagggtttatgtgtcagggtggtgacttcacacgccataatggcactggtggcaagtccatctatggggagaaatttgaagatgagaacttcatcctaaagcatacgggtcctggcatcttgtccatggcaaatgctggacccaacacaaatggttcccagtttttcatctgcactgccaagactgagtggttggatggcaagcatgtggtgtttggcaaagtgaaagaaggcatgaatattgtggaggccatggagcgctttgggtccaggaatggcaagaccagcaagaagatcaccattgctgactgtggacaactcgaataagtttgacttgngttttatcttaaccaccagatcattccttctgtagctcaggagagcaccccttcaccccatttgctcgcagtatcctagaatctttgtgctctcgctgaatttccctttgggttncatggtttccttggtccctnccatgcctaagcttgattgcanaagttaaagtttaatgaattattnaaattaaaaaacttaaanttaacccaatttggaaaaaaaan

SEQ ID NO: 1887 - DNA, 569 bp, Homo sapiens
  misc_feature (377)..(377): n equals a,t,g, or c
  misc_feature (523)..(523): n equals a,t,g, or c
  misc_feature (566)..(569): n equals a,t,g, or c
ggttttttgttgtattttggaagacaggttttttaaagaaacattttcctcagattaaaagatgatgctattacaactagcattgcctcaaaaactgggaccaaccaaagtgtgtcaaccctgtttccttaaaagaggctatgaatcccaaaggccacatccaagacaggcaataatgagcagagtttacagctcctttaataaaatgtgtcagtaattttaaggtttatagttccctcaacacaattgctaatgcagaatagtgtaaaatgcgcttcaagaatgttgatgatgatgatatagaattgtggctttagtagcacagaggatgccccaacaaactcatggcgttgaaaccacacagttctcattactgntatttattagctgtagcattctctgtctcctctctctcctcctttgaccttctcctcgaccagccatcatgacatttaccatgaatttacttcctcccaagagtttggactgccgtcagattgttgctgcacatagttgcctttgnatctctgtatgaaataaaaggtcatttggtcaaaaaaaaaaannnn

SEQ ID NO: 1888 - DNA, 561 bp, Homo sapiens
  misc_feature (137)..(137): n equals a,t,g, or c
  misc_feature (228)..(228): n equals a,t,g, or c
  misc_feature (231)..(231): n equals a,t,g, or c
  misc_feature (258)..(258): n equals a,t,g, or c
  misc_feature (321)..(321): n equals a,t,g, or c
  misc_feature (369)..(369): n equals a,t,g, or c
  misc_feature (374)..(374): n equals a,t,g, or c
  misc_feature (409)..(409): n equals a,t,g, or c
  misc_feature (445)..(445): n equals a,t,g, or c
  misc_feature (491)..(491): n equals a,t,g, or c
  misc_feature (523)..(523): n equals a,t,g, or c
  misc_feature (525)..(525): n equals a,t,g, or c
  misc_feature (530)..(530): n equals a,t,g, or c
  misc_feature (541)..(541): n equals a,t,g, or c
ggtacgccaaggccaacgcacagactgaccgagtggccctgaggaacctgctccgacgctacaaccagagcgaggctgggtctcacaccctccagggaatgaatggctgcgacatggggcccgacggacgcctcctncgcgggtatcaccagcacgcgtacgacggtaaggattacatctccctgaacgaggacctgcgctcctggaccgcggtggaaaccgtggctnaanatcacccaagcgcttttatgaaggcanaaggaatattgcacagggaagttcaaggacctacctggaagggcgaagtgcctggaagtttgntccgcaaaatactttggaggaatgggaaaggagaacgcttcaagcggngcaanatccttccaaaagggcacacggtttgcccaaccancccatctctgaccatgaaggccacccttgagggtgnttgggcccttggctttctaccctgcggagatacgcttacctggcancgggatggggaggaacaagacccaggacacanancttgnggagaacaagnctgcagggatggaaccttca

SEQ ID NO: 1889 - DNA, 376 bp, Homo sapiens
  misc_feature (250)..(250): n equals a,t,g, or c
  misc_feature (276)..(276): n equals a,t,g, or c
  misc_feature (307)..(307): n equals a,t,g, or c
  misc_feature (314)..(315): n equals a,t,g, or c
  misc_feature (336)..(336): n equals a,t,g, or c
  misc_feature (372)..(372): n equals a,t,g, or c
ggggacagtccctgcctgcaaagagcaccgtgtgaacaaggccactgtggtcctgaggggtgctctggacagggtgcagggccacatggtggaagggacagggtgctttgcggagtggggtggggcaagcctctgtcgggagctggattttcgtgaccggacgaggaggagctgttggagatatgggaagctcaactaagaaggtagtgcaggcctacctgagcaccgcagtcccgactcactgaacaanggctggcaggacggaggtagaaagtntggaccgagtaagttgatggtatccaggcanatgactnnaagtgctgtgagtgaaggaanacaatgcaacagcctgacaaacggacaggagctgangtca

SEQ ID NO: 1890 - DNA, 577 bp, Homo sapiens
  misc_feature (4)..(5): n equals a,t,g, or c
  misc_feature (20)..(20): n equals a,t,g, or c
  misc_feature (34)..(34): n equals a,t,g, or c
  misc_feature (66)..(66): n equals a,t,g, or c
  misc_feature (259)..(260): n equals a,t,g, or c
  misc_feature (294)..(294): n equals a,t,g, or c
  misc_feature (304)..(304): n equals a,t,g, or c
  misc_feature (324)..(324): n equals a,t,g, or c
  misc_feature (327)..(327): n equals a,t,g, or c
  misc_feature (332)..(332): n equals a,t,g, or c
  misc_feature (556)..(556): n equals a,t,g, or c
  misc_feature (560)..(560): n equals a,t,g, or c
  misc_feature (574)..(576): n equals a,t,g, or c
tganntgccccgcctgcagntacccggtccgganttcccgggtcgacccacgcgtccggcctcatnttcctcagtttcatccccatccccaggtcttcctagacgctcagcacccccttctcccctgtgccgtagtttgtctcctgggactgggggaggagtccgaggtggggttggttacctgtcccgaggggaccctgtccgggtccttgctcggagagtacggcctgatggctctgtgcagacctggttgagtggnnaggagggggcatctttgaacagctgctttgccanattccaattnacacacgggctttatatccntgnctttncctaactacagttggatgacctgagagatagggggagtctccctactgccaggctggaatcaagagtgggagtgggaagaggcctttcttaccctcttatgattctgaccctccatcttccatttctttgatgtattttgtacagtttttaaaatttttaaaatattaaccctgggcagaactgagagggaggatgatagggatcccggctctgataatgaatnaagngaataaccaccaannng

SEQ ID NO: 1891 - DNA, 652 bp, Homo sapiens
  misc_feature (209)..(209): n equals a,t,g, or c
  misc_feature (225)..(225): n equals a,t,g, or c
  misc_feature (238)..(238): n equals a,t,g, or c
  misc_feature (263)..(263): n equals a,t,g, or c
  misc_feature (265)..(265): n equals a,t,g, or c
  misc_feature (269)..(269): n equals a,t,g, or c
  misc_feature (288)..(288): n equals a,t,g, or c
  misc_feature (293)..(293): n equals a,t,g, or c
  misc_feature (409)..(409): n equals a,t,g, or c
  misc_feature (447)..(447): n equals a,t,g, or c
  misc_feature (456)..(456): n equals a,t,g, or c
  misc_feature (477)..(477): n equals a,t,g, or c
  misc_feature (487)..(487): n equals a,t,g, or c
  misc_feature (541)..(541): n equals a,t,g, or c
  misc_feature (547)..(547): n equals a,t,g, or c
  misc_feature (563)..(563): n equals a,t,g, or c
  misc_feature (572)..(572): n equals a,t,g, or c
  misc_feature (600)..(600): n equals a,t,g, or c
ggtctgcccaagcccctcaccctgagatgggagccatcttcccagcccaccgtccccatcgtgggcatcattgctggcctggttctccttggagctgtgatcactggagctgtggtcgctgctgtgatgtggaggaggaacagctcagatagaaaaggagggagctactctcaggctgcaagcagtgacagtgcccagggctctgatgngtctctcacagtttgnaaagtgaaaaaangtttcctttgggggactgataaggnanaaanggttcttcctgcccttccntttgngacttgaagaaccctgactttgtttctgcaaaggcacctgcatgtgtctgtgttcatgtaggcataatgtgaggagggtggggagaccaccccacccccatgtcaccatgaccctnttccacgctgacctgtgctcccttcccaatcatctttnctggtgcanagaggtggtcttgaggtgctncatctctgtntcaactttatggtgcactgagctggaacttctttcttcctattaaaaatagaanctgagnataaatttactttctnaaatcttgncatgagaggttatgagtaattaaagganagattctaaaattggagacaaataaatggacacatgagaaccttaaaaaaaa

SEQ ID NO: 1892 - DNA, 752 bp, Homo sapiens
  misc_feature (49)..(49): n equals a,t,g, or c
  misc_feature (73)..(73): n equals a,t,g, or c
  misc_feature (91)..(91): n equals a,t,g, or c
  misc_feature (93)..(93): n equals a,t,g, or c
  misc_feature (107)..(107): n equals a,t,g, or c
  misc_feature (134)..(134): n equals a,t,g, or c
  misc_feature (185)..(185): n equals a,t,g, or c
  misc_feature (206)..(206): n equals a,t,g, or c
  misc_feature (220)..(220): n equals a,t,g, or c
  misc_feature (236)..(236): n equals a,t,g, or c
  misc_feature (243)..(243): n equals a,t,g, or c
  misc_feature (267)..(267): n equals a,t,g, or c
  misc_feature (283)..(283): n equals a,t,g, or c
  misc_feature (351)..(351): n equals a,t,g, or c
  misc_feature (359)..(359): n equals a,t,g, or c
  misc_feature (373)..(373): n equals a,t,g, or c
  misc_feature (377)..(377): n equals a,t,g, or c
  misc_feature (401)..(401): n equals a,t,g, or c
  misc_feature (418)..(418): n equals a,t,g, or c
  misc_feature (431)..(431): n equals a,t,g, or c
  misc_feature (438)..(438): n equals a,t,g, or c
  misc_feature (450)..(450): n equals a,t,g, or c
  misc_feature (480)..(480): n equals a,t,g, or c
  misc_feature (520)..(520): n equals a,t,g, or c
  misc_feature (526)..(526): n equals a,t,g, or c
  misc_feature (531)..(531): n equals a,t,g, or c
  misc_feature (555)..(555): n equals a,t,g, or c
  misc_feature (559)..(559): n equals a,t,g, or c
  misc_feature (577)..(577): n equals a,t,g, or c
  misc_feature (587)..(587): n equals a,t,g, or c
  misc_feature (589)..(589): n equals a,t,g, or c
  misc_feature (641)..(641): n equals a,t,g, or c
  misc_feature (671)..(671): n equals a,t,g, or c
  misc_feature (695)..(695): n equals a,t,g, or c
  misc_feature (702)..(702): n equals a,t,g, or c
  misc_feature (712)..(712): n equals a,t,g, or c
gaagcaaactaactttttttttttaacatctttgtttttaaaatagaangatagaactttgccagtctttaanatcttggcttaatttaangnattaatctgtttgngcaaacataataccaccatttaaaaangttagggagatgagttgcagtttttataatagattttttttaaagtttggnattgtaaaacattcacacctntgtccctcaaaatngataattacgtttaangggcagncatttggggttagaatcttgtttngtttgcttccattatngagttcctcctaaggaaattgaggagagggactgaatagaagcccaaattcatataaaagttgcgttnaaagttgnattaaaaatagatntatnagaaaaaattctttcacttgatgnttgttagaccagaaagngggggggttctgnagctcanttcccaaacagntttttaggtagtggaggaggggcttcatgngcacttggcatttatattccacttgggagggtcaggctgngccttntggancaagtggcttggtaaggaacgctngcanggcatggcacgggagctncggaatagangncttcatcactttttcactggggggtggcactggtttccttacctaattcctnaaatccccagttttctcctctggtatgcantttcttacaggggcaactttgaancccgtgnttaaaaagantattaagccctgcaaaaggtaaagctttattggggatacc

SEQ ID NO: 1893 - DNA, 617 bp, Homo sapiens
  misc_feature (328)..(328): n equals a,t,g, or c
  misc_feature (569)..(569): n equals a,t,g, or c
  misc_feature (584)..(584): n equals a,t,g, or c
  misc_feature (605)..(605): n equals a,t,g, or c
  misc_feature (607)..(607): n equals a,t,g, or c
  misc_feature (613)..(613): n equals a,t,g, or c
ggcgcgctgcgccccagcaccagccgcagcctctacgcctcgtccccgggcggcgtgtatgccacgcgctcctctgccgtgcgcctgcggagcagcgtgcccggggtgcggctcctgcaggactcggtggacttctcgctggccgacgccatcaacaccgagttcaagaacacccgcaccaacgagaaggtggagctgcaggagctgaatgaccgcttcgccaactacatcgacaaggtgcgcttcctggagcagcagaataagatcctgctggccgagctcgagcagctcaagggccaaggcaagtcgcgcctgggggacctctacnaggaggagatgcgggagctgcgccggcaggtggaccagctaaccaacgacaaagcccgcgtcgaggtggagcgcgacaacctggccgaggacatcatgcgccttccggagaaattgcaggaggagatgcttcagagagaggaagccgaaaacaccctgcaatctttcaacaggatgttacaatgcgtctcttgcacgtcttgacttgaacgcaaagtggaatctttgaagaagagaatgcnttttgaagaaactcncgaaaagaaatccaggactgnangctcanatta

SEQ ID NO: 1894 - DNA, 647 bp, Homo sapiens
  misc_feature (482)..(482): n equals a,t,g, or c
  misc_feature (500)..(500): n equals a,t,g, or c
  misc_feature (542)..(542): n equals a,t,g, or c
  misc_feature (570)..(570): n equals a,t,g, or c
  misc_feature (577)..(577): n equals a,t,g, or c
  misc_feature (582)..(582): n equals a,t,g, or c
  misc_feature (614)..(614): n equals a,t,g, or c
  misc_feature (629)..(629): n equals a,t,g, or c
gtacagggtcctagctgggggcctgggtgggccctgggctctgggccctgctgctctagccccagccaccagcctgtccctgttgtaaggaagccaggtctctctcttcattcctcttaggagagtgccaaactcagggacccagcactgggctgggttgggagtagggtgtcccagtggggttggggtgagcaggctgctgggatcccatggcctgagcagagcatgtgggaactgttcagtggcctgtgaactgtcttccttgttctagccaggctgttcaagactgctctccatagcaaggttctagggctcttcgccttcagtgttgtggccctagctatgggcctaaattgggctctaggtctctgtccctggcgcttgaggctcagaagagcctctgtccagcccctcagtattaccatgtctccctctcaggggtagcagagacagggttgcttataggaagctgcaccactcanctcttctgctactccagnttcctagcctcttgcaaggcactcaaggtgggggacaagcangatcaagacaacccgttggagcccctgnggttcanagganctgatgccaaggggtaatgggcccaacaatgncttttgaagccaagncccaaaaaagccccatgg

SEQ ID NO: 1895 - DNA, 595 bp, Homo sapiens
  misc_feature (214)..(214): n equals a,t,g, or c
  misc_feature (226)..(226): n equals a,t,g, or c
  misc_feature (518)..(518): n equals a,t,g, or c
  misc_feature (553)..(553): n equals a,t,g, or c
  misc_feature (575)..(575): n equals a,t,g, or c
  misc_feature (591)..(591): n equals a,t,g, or c
  misc_feature (595)..(595): n equals a,t,g, or c
gtgctggaaacagttcctcgaagtggagaggtttacacctgccaagtggagcacccaagcgtgacgagccctctcacagtggaatggagagcacagtctgaatctgcacagagcaagatgctgagtggagtcgggggctttgtgctgggcctgctcttccttggggccgggctattcatctacttcaagaatcagaaagggcactctggacttnaccaaacaaggnattcgtgagctgaagtgcagatgaccacattcaagggggaaccttctgccccagctttgcatgatgaaaagctttcctgcttggctcttattcttccacaagagaggactttctcaggccctggttgctaccggttcagcaactctgcagaaaatgtccatccttgtggcttcctcagctcctgcccttggcctgaaagtcccagcattgatggcagtgcctcatcttcaactttagtgcttccctttacctaaccctacggcttccatgcatctgtacttcccctgtgtgncacaaatgcactacgttattaaaattttctgaagnccaaaaaaaaaaaaaaaagggnggcccttttaaagganccan

SEQ ID NO: 1896 - DNA, 589 bp, Homo sapiens
  misc_feature (7)..(7): n equals a,t,g, or c
  misc_feature (229)..(229): n equals a,t,g, or c
  misc_feature (240)..(240): n equals a,t,g, or c
  misc_feature (534)..(534): n equals a,t,g, or c
  misc_feature (545)..(545): n equals a,t,g, or c
  misc_feature (587)..(589): n equals a,t,g, or c
ggcctgnagctgtgtagtgctggacagtgacaaccctttctctccagttctccactccaatgataatagttcacttacacctaaacccaaaggaaaaaccagctctaggtccaattgttctgctctaactgatacctcaaccttggggccagcatctcccactgcctccaaatattagtaactatgactgacgtccccagaagtttctgggtctaccacacttcccaancccccaattcntacttcctgaagggccctcccaaggctacatccccaccccacagttctccctgagagagatcaacctccctgagatcaaccaaggcagatgtgacagcaagggccacggaccccatggcaggggtggcgtcttcatgagggaggggcccaaagcccttgtgggcggacctcccctgagcctgtctgaggggccagcccttagtgcattcaggctaaggcccctgggcagggatgccacccctgctccttcggaggacgtgccctcacccctcactggtccactgcttgagactnaccccgtctgnccaagtaaaagcctttcttgcagcagcttgaaaaaaaaaaannn

SEQ ID NO: 1897 - DNA, 670 bp, Homo sapiens
  misc_feature (257)..(257): n equals a,t,g, or c
  misc_feature (512)..(512): n equals a,t,g, or c
  misc_feature (567)..(567): n equals a,t,g, or c
  misc_feature (595)..(595): n equals a,t,g, or c
  misc_feature (646)..(646): n equals a,t,g, or c
  misc_feature (659)..(659): n equals a,t,g, or c
gccgggccctgcaggagagagaggccaccctggagctccggggccttcggggagccctggcttgcctggtgtgcctggctccatgggagacatggtgaattatgatgaaatcaagaggttcatcagacaagagatcattaaaatgtttgatgagagaatggcttactacacctccaggatgcagttccccatggagatggcggcagctccgggacgaccagggcctccagggaaggatggtgcttcgggcaggccangtgcttcagggtcacctgggctccctggtcagattggcagagaaggacggcaggcttgccaggagtaagaggattgcctggtaccaaaggtgaaaaaggggacattggtattggcattgcaggagaaaatggtcttcccggccccccaggtcctcaaggtcctccaggctatggcaagatgggtgcaacaggaccaatgggccagcaaggcatccctggcatccctggcccccgggtcccatggccagccaggcnaggctggccactgtaatccctcttactgctttggggccatgcccattgagcacantacccacccatgaaaccatgaagggccntttgctgaaaatcccactgcctttgatgaaaactcccttggaataaatggncaagttatagatnttgaaaaaaaa

SEQ ID NO: 1898 - DNA, 759 bp, Homo sapiens
  misc_feature (285)..(285): n equals a,t,g, or c
  misc_feature (287)..(287): n equals a,t,g, or c
  misc_feature (442)..(442): n equals a,t,g, or c
  misc_feature (449)..(449): n equals a,t,g, or c
  misc_feature (636)..(636): n equals a,t,g, or c
  misc_feature (647)..(647): n equals a,t,g, or c
  misc_feature (650)..(650): n equals a,t,g, or c
  misc_feature (684)..(684): n equals a,t,g, or c
  misc_feature (696)..(696): n equals a,t,g, or c
  misc_feature (699)..(699): n equals a,t,g, or c
  misc_feature (723)..(723): n equals a,t,g, or c
  misc_feature (748)..(748): n equals a,t,g, or c
  misc_feature (759)..(759): n equals a,t,g, or c
caacggaatacgctggtacgcctgcaggtaccggtccggaattcccgggtcgacccacgcgtccggaaagaaaggggcattggtgatataaagattttacagaattatgataataagcaagttcgtatagtgatgagaagggaccaagtattaaaactttgtgccaatcacagaataactccagacatgagtttgcaaaatatgaaagggacagaaagagtatgggtgtggactgcatgtgattttgcagatggagaaagaaaagtagagcatttagctgttcgntntaaactacaggatgttgcagactcatttaagaaaatttttgatgaagcaaaaacagcccaagaactctgatatcgaacagtcttcagatagcaaagtcaaaaatctctctgcttcctttccaatggaagaatcttcaatcaactacacatttaanacaccanaaaaggagcctccattatggcatgctgaatttaccaaagaagaattggttcagaaagctcagttccaccacaaaaagtgcagatcaattaaacggcctgcttcgggaaacagaggcaaccagtgcagtccttatggagcaaattaagcttctcaaagtgaaataagaagaatggaaagggaatcaangaggagtctgnaanctacggggaacacttgaagaacgctttgctgaantcaatttctttnaanccagtagtgagagagagacccttnttcctgtataaaataccaatttganttaaccttaan

SEQ ID NO: 1899 - DNA, 689 bp, Homo sapiens
  misc_feature (5)..(5): n equals a,t,g, or c
  misc_feature (222)..(222): n equals a,t,g, or c
  misc_feature (323)..(323): n equals a,t,g, or c
  misc_feature (337)..(337): n equals a,t,g, or c
  misc_feature (370)..(370): n equals a,t,g, or c
  misc_feature (381)..(381): n equals a,t,g, or c
  misc_feature (402)..(402): n equals a,t,g, or c
  misc_feature (465)..(465): n equals a,t,g, or c
  misc_feature (468)..(468): n equals a,t,g, or c
  misc_feature (479)..(479): n equals a,t,g, or c
  misc_feature (482)..(482): n equals a,t,g, or c
  misc_feature (485)..(485): n equals a,t,g, or c
  misc_feature (491)..(491): n equals a,t,g, or c
  misc_feature (522)..(522): n equals a,t,g, or c
  misc_feature (525)..(525): n equals a,t,g, or c
  misc_feature (546)..(546): n equals a,t,g, or c
  misc_feature (576)..(576): n equals a,t,g, or c
  misc_feature (609)..(609): n equals a,t,g, or c
  misc_feature (620)..(620): n equals a,t,g, or c
  misc_feature (634)..(634): n equals a,t,g, or c
  misc_feature (654)..(654): n equals a,t,g, or c
  misc_feature (680)..(680): n equals a,t,g, or c
  misc_feature (689)..(689): n equals a,t,g, or c
gccgngaggtggccaccgatcacaaagccttctacgtcctttttacctgggaccaggaggcccagatatacgagctggtggcacagactgtgtcggagcggaaaaactggtgtgctctcatcactgagactgccggatccctgaaagtccctgcccctgcctctcgccctaagccccggcccagcccgagcagcacccgagaacccctcctcagcagctctnaaaacggcaatggtggccgagagacgtcttcagctgatgcccggaccgagagaatcctcagtgaccttctgccttctgcagaccaagccccgagggccaanttggttgccacggnccttcgaaagtgctgccctgaagcaacttctgnttccggcggangaaaacaatggggcgggcctnctcgagatggggatggggtcccaagggggcgggcccctgagcccagcatggacccaggaaatncanggagaacctgnttnagnttggangaaaaccatgaaacaacttgaggaattggangangaaattttgccgcctgaaaanccctcctgggttaaatttgggggggaattntttccccaaactgggttgacttgaggtttcccnccaagaaggcnttttcaaaaaaggnaagaaagggggaaaaggccngggggacccccccaacccaaaagttncgaaatttn

SEQ ID NO: 1900 - DNA, 775 bp, Homo sapiens
  misc_feature (667)..(667): n equals a,t,g, or c
  misc_feature (715)..(715): n equals a,t,g, or c
  misc_feature (729)..(729): n equals a,t,g, or c
  misc_feature (749)..(749): n equals a,t,g, or c
  misc_feature (754)..(754): n equals a,t,g, or c
  misc_feature (761)..(761): n equals a,t,g, or c
gggctttcactttctcttttgttttaaatgactcataggtccctgacatttagttgattattttctgctacagacctggtacactctgattttagataaagtaagcctaggtgttgtcagcaggcaggctggggaggccagtgttgtgggcttcctgctgggactgagaaggctcacgaagggcatccgcaatgttggtttcactgagagctgcctcctggtctcttcaccactgtagttctctcatttccaaaccatcagctgcttttaaaataagatctctttgtagccatcctgttaaatttgtaaacaatctaattaaatggcatcagcactttaaccaatgacgtttgcatagagagaaatgattgacagtaagtttattgttaatggttcttacagagtatctttaaaagtgccttaggggaaccctgtccctcctaacaagtgtatctcgattaataacctgccagtcccagatcacacatcatcatcgaagtcttccccagttataaagaggtcacatagtcgtgtgggtcgaggattctgtgcctccaggaccaggggcccaccctctgcccagggagtccttgcgtcccatgaggtcttcccgcaaggcctctcaaacccagatgtgacgggtgtgtggcccgaggaactggacagnggcagtgggcctgctaggccttctcttgaggcctgggctcttgggggncccttggttaaccngggctggaacaacttggccnggggnccttttnaaaagaccttgctg

SEQ ID NO: 1901 - DNA, 778 bp, Homo sapiens
  misc_feature (15)..(15): n equals a,t,g, or c
  misc_feature (35)..(35): n equals a,t,g, or c
  misc_feature (39)..(39): n equals a,t,g, or c
  misc_feature (56)..(56): n equals a,t,g, or c
  misc_feature (78)..(78): n equals a,t,g, or c
  misc_feature (91)..(91): n equals a,t,g, or c
  misc_feature (116)..(116): n equals a,t,g, or c
  misc_feature (197)..(197): n equals a,t,g, or c
  misc_feature (259)..(259): n equals a,t,g, or c
  misc_feature (266)..(266): n equals a,t,g, or c
  misc_feature (306)..(306): n equals a,t,g, or c
  misc_feature (309)..(309): n equals a,t,g, or c
  misc_feature (338)..(338): n equals a,t,g, or c
  misc_feature (360)..(360): n equals a,t,g, or c
  misc_feature (450)..(450): n equals a,t,g, or c
  misc_feature (497)..(497): n equals a,t,g, or c
  misc_feature (517)..(517): n equals a,t,g, or c
  misc_feature (554)..(554): n equals a,t,g, or c
  misc_feature (575)..(575): n equals a,t,g, or c
  misc_feature (582)..(582): n equals a,t,g, or c
  misc_feature (585)..(585): n equals a,t,g, or c
  misc_feature (597)..(597): n equals a,t,g, or c
  misc_feature (605)..(605): n equals a,t,g, or c
  misc_feature (619)..(619): n equals a,t,g, or c
  misc_feature (655)..(655): n equals a,t,g, or c
  misc_feature (659)..(659): n equals a,t,g, or c
  misc_feature (661)..(661): n equals a,t,g, or c
  misc_feature (707)..(707): n equals a,t,g, or c
  misc_feature (725)..(725): n equals a,t,g, or c
  misc_feature (752)..(752): n equals a,t,g, or c
  misc_feature (759)..(759): n equals a,t,g, or c
  misc_feature (761)..(761): n equals a,t,g, or c
ggttgacactgattncagtgacaagatgacatgantggnagtcagtagacatgcanagagaggacaccctagaacttnttcctgaagtggntcttagcttattttctaagcagagntcattctggtgaggcaagaagtagaatgtcatctttcactctaatgctttttataccatagatttgagacaactagcctgntattcagcccaatatccccccatggttttcccccaatctccctagcctctgctgcgagaagntctgganaagcagccagtgctaagccagaccgaggcccgcgacttantanaacgcttcatgcgagtgctgtactaccgngatgcccgttcttacaaccggntgagggatgtgctgggaacctaattggcgggctctggctacttgcaatccctgggtctctatgctttgaagaacagattgccttacttgngtgactcctattttcacattggggaagacctccacctgacctttcanttaaggacttaaggcgtggncattattgaatgctctgctttcttccagtttcaaatngccactgtcaccgaaaaaggngttgaantanagggaccattgnctaccganaccaactgggatantgcccacatgatcagcggcttttaaatgaaatacangatncnttatcccagaacttgaacttggccctactttttaactttttgaacntgggctaaggtttcaaangattggacccctttccttttgggaaangtaaaantnaaagttcttttccaaaa

SEQ ID NO: 1902 - DNA, 774 bp, Homo sapiens
  misc_feature (293)..(293): n equals a,t,g, or c
  misc_feature (313)..(313): n equals a,t,g, or c
  misc_feature (333)..(333): n equals a,t,g, or c
  misc_feature (497)..(497): n equals a,t,g, or c
  misc_feature (579)..(579): n equals a,t,g, or c
  misc_feature (585)..(585): n equals a,t,g, or c
  misc_feature (611)..(611): n equals a,t,g, or c
  misc_feature (621)..(621): n equals a,t,g, or c
  misc_feature (668)..(668): n equals a,t,g, or c
  misc_feature (670)..(670): n equals a,t,g, or c
  misc_feature (685)..(685): n equals a,t,g, or c
  misc_feature (690)..(690): n equals a,t,g, or c
  misc_feature (740)..(740): n equals a,t,g, or c
  misc_feature (743)..(743): n equals a,t,g, or c
  misc_feature (761)..(761): n equals a,t,g, or c
  misc_feature (769)..(769): n equals a,t,g, or c
gaagggctcccccacttcaggctggtcactgtatgttgacttccctctgggaagcaaaattccacttgtaaaaatcagcttccaagacaaaagatgatccgatgtcacttctgggtcaccaggaagggacacaggatctctctgaactttggaacagaccctcatattctggggccagaagtttgcccagaaagcagcaggtggctctgcctggctgtagagcccagctcattggctgtccctgggcttcgtctccctcttccgagtagttgctgcctttcttcagatcaggntaccacaatgcctccccctncttgacgcttaatccccaanacctccggccccagttacctggagctttcagaacccactttgccggtgctaaaacacaagaagggggtgaaagtggctgccagtaatggccagaaaccaaccaccagaggccaggctgaaagacaagctccgggtgccagggctgacggccaaccatgtggcangtcccaggccccaccactggccatccgctctagcttcacagtggcccactaatgggaacctctctagggagagtgatactgnaccttncccgtaggactcaaattatacaatgngaatggctgnagcaaaaagccttggttctagattaaatggtcaaagaaacagcgctntnttgtttgaataaaanagttnaaagagtccggataatggactccaatctgataaggcctttggaagaaacngtnttaataaaggagaaacgntttttgcngttgg

SEQ ID NO: 1903 - DNA, 821 bp, Homo sapiens
  misc_feature (42)..(42): n equals a,t,g, or c
  misc_feature (713)..(713): n equals a,t,g, or c
  misc_feature (716)..(716): n equals a,t,g, or c
  misc_feature (719)..(719): n equals a,t,g, or c
  misc_feature (785)..(785): n equals a,t,g, or c
  misc_feature (794)..(794): n equals a,t,g, or c
  misc_feature (800)..(800): n equals a,t,g, or c
  misc_feature (815)..(815): n equals a,t,g, or c
  misc_feature (821)..(821): n equals a,t,g, or c
gggaaaagggagacttatatgggaaagttggtacgcctgcangtaccggtccggaattcccgggtcgacccacgcgtccgcggacgcgtgggcagtcctgagagggggcaagtacgcagccacctcacaggtgctgctgccttccaaggacgtcatgcagggcacagacgaacacgtggtgtgcaaagtccagcaccccaacggcaacaaagaaaagaacgtgcctcttccagtgattgctgagctgcctcccaaagtgagcgtcttcgtcccaccccgcgacggcttcttcggcaacccccgcaagtccaagctcatctgccaggccacgggtttcagtccccggcagattcaggtgtcctggctgcgcgaggggaagcaggtggggtctggcgtcaccacggaccaggtgcaggctgaggccaaagagtctgggcccacgacctacaaggtgaccagcacactgaccatcaaagagagcgactggctcggccagagcatgttcacctgccgcgtggatcacaggggcctgaccttccagcagaatgcgtcctccatgtgtgtccccgatcaagacacagccatccgggtcttcgccatccccccatcctttgccagcatcttcctcaccaagtccaccaagttgacctgcctggtcacagacctgaccacctattacagcgtgaccatctcctggacccgccagaatggcnaanctntgaaaacccacaccaacatcttccagagccaccccaatgccacttttaacgccctgggttaagccngcatctgcnaggatnactggaattcccggnagaggn

SEQ ID NO: 1904 - DNA, 496 bp, Homo sapiens
  misc_feature (249)..(249): n equals a,t,g, or c
  misc_feature (268)..(268): n equals a,t,g, or c
  misc_feature (425)..(425): n equals a,t,g, or c
  misc_feature (444)..(444): n equals a,t,g, or c
  misc_feature (479)..(479): n equals a,t,g, or c
  misc_feature (488)..(488): n equals a,t,g, or c
  misc_feature (491)..(491): n equals a,t,g, or c
gcaaaaccattatataaactcacaaaaggaaacctagccgaccccatagatactaaatcctttcccccactcctctttccattccttgaagacagctttagaaactgcccccactatagctctccctgactcatcctaacccttttcattacacacagctgaagtgcagggctgtgcagtaagaattcttacacaaggatgaggatcgcgtcctgtagcctttttgtccaaacaacttgaccttactgntttaggctggccatcatgnctccatgcagcggctgctaccaccctaatattttagagggcccttaaaatcacaaactatgctcaatgcactctctacagctctcataatttccagaatctattttcttcctcacacctgatgcatatactttctggtccccggctccttcagctgnactcactctttggtggagnctcccacaggtaccatggttctggcttcggacttncaatccggnctnccaca

SEQ ID NO: 1905 - DNA, 515 bp, Homo sapiens
  misc_feature (510)..(515): n equals a,t,g, or c
gaacagaggcaggtcagggttgtccgctctgattagcagaacgacagccccttcctcctcctccctccttcccatccctactcattagctccctgctcctgggatgcttcccaagcagcccaggcctctagcctccatggctgatgacctcagctttcacactggtgaagtctgtgtacccatactgcagccccatcccatggggcccctgaagacccactgaggaattccgtagggtcttgttcccacgaccggagtgctggctctcacagtgaattttgatgcatttaaaataagattctgatgccagactgttaaaataggcgctggttctgaagcaccgatggaaacagattgatgcagatggaaggaggaagggagactgggcccactgatttccagccccaccatgtgtgctggtttcagatgtgattgaggggtggtctgccctgccttcactgtcacagcctttaataaagatgtgaatctttgaaagccaaaaaaaaaaannnnnn

SEQ ID NO: 1906 - DNA, 459 bp, Homo sapiens
  misc_feature (298)..(298): n equals a,t,g, or c
  misc_feature (424)..(424): n equals a,t,g, or c
  misc_feature (438)..(438): n equals a,t,g, or c
  misc_feature (449)..(449): n equals a,t,g, or c
  misc_feature (454)..(454): n equals a,t,g, or c
  misc_feature (458)..(458): n equals a,t,g, or c
ggtcggccaccatcacgtgcctggtgacgggcttctctcccgcggacgtcttcgtgcagtggatgcagagggggcagcccttgtccccggagaagtatgtgaccagcgccccaatgcctgagccccaggccccaggccggtacttcgcccacagcatcctgaccgtgtccgaagaggaatggaacacgggggagacctacacctgcgtggtggcccatgaggccctgcccaacagggtcaccgagaggaccgtggacaagtccaccggtaaacccaccctgtacaacgtgtccctggncatgtccgacacagctggcacctgctactgaccctgctggcctgcccacaggctcggacggctggccgctctgtgtgtgcatgcaaactaaccgtgtcaacggcgtgagatgttgcatcttataanattagaaataaaangatccattcanaagancaant

SEQ ID NO: 1907 - DNA, 783 bp, Homo sapiens
  misc_feature (479)..(479): n equals a,t,g, or c
  misc_feature (481)..(481): n equals a,t,g, or c
  misc_feature (626)..(626): n equals a,t,g, or c
  misc_feature (650)..(650): n equals a,t,g, or c
  misc_feature (705)..(705): n equals a,t,g, or c
  misc_feature (709)..(709): n equals a,t,g, or c
  misc_feature (714)..(714): n equals a,t,g, or c
  misc_feature (721)..(721): n equals a,t,g, or c
  misc_feature (723)..(723): n equals a,t,g, or c
  misc_feature (761)..(761): n equals a,t,g, or c
gatttgaagtgggcagagaacatcagatgattgaaatgttcgcccaggggtctccagcaactttggaaatctctttgtatttttacttgaagtgccactaatggacagcagatattttctggctgatgttggtattgggtgtaggaacatgatttaaaaaaaaactcttgcctctgctttcccccactctgaggcaagttaaaatgtaaaagatgtgatttatctggggggctcaggtatggtggggaagtggattcaggaatctggggaatggcaaatatattaagaagagtattgaaagtatttggaggaaaatggttaattctgggtgtgcaccagggttcagtagagtccacttctgccctggagaccacaaatcaactagctccatttacagccatttctaaaatggcagcttcagttctagagaagaaagaacaacatcagcagtaaagtccatggaatagctagtggtctgngnttcttttcgccattgcctagcttgccgtaatgattctataatgccatcatgcagcaattattagaggctaggtcatccaaagagaagaccctatcaatgtaggttgcaaaatctaacccctaaggaagtgcagctttgatttganttcctagtaaccttgcagatatgnttaaccaagccatagcccatgccttttgaggctgaaccaataagggacttactgntaanttacntttgacncnttaaggggtctcaccttgaaacttatccctggaaaggnccttgatttaagcccctggctt

SEQ ID NO: 1908 - DNA, 763 bp, Homo sapiens
  misc_feature (182)..(182): n equals a,t,g, or c
  misc_feature (581)..(581): n equals a,t,g, or c
  misc_feature (593)..(593): n equals a,t,g, or c
  misc_feature (600)..(601): n equals a,t,g, or c
  misc_feature (637)..(637): n equals a,t,g, or c
  misc_feature (656)..(656): n equals a,t,g, or c
  misc_feature (700)..(700): n equals a,t,g, or c
  misc_feature (730)..(730): n equals a,t,g, or c
  misc_feature (741)..(741): n equals a,t,g, or c
  misc_feature (744)..(744): n equals a,t,g, or c
gcggacgcgtgggcggtaagcttgagcaacgcggtaaaaatattgcttcggtgggtgacgcggtacagctgcccaagggcgttcgtaacgggaatgccgaagcgtgggaaaaagggagcggtggcggaagacggggatgagctcaggacagagccagaggccaagaagagtaagacggccgnaaagaaaaatgacaaagaggcagcaggagagggcccagccctgtatgaggaccccccagatcagaaaacctcacccagtggcaaacctgccacactcaagatctgctcttggaatgtggatgggcttcgagcctggattaagaagaaaggattagattgggtaaaggaagaaattgaccttcgcaaccccaaggggaacaaaaagaatgctggcttcacgccacaagagcgccaaggcttcggggaattactgcaggctgtgccactgctgacagctttaggcacctctaccccaacacaccctatgcctacaccttttggacttatatgatgaatgctcgatcccaagaaatgtggttggcgccttggaataactttttgtggcccaattttttgtancttgcattgtgngacagcnnggatccgttccaaggcccttcggagggaatactggnctaataaccttatacctancattgggacaccaccccttaaataattttaacctgggaaaaaanccccttaattaccaatccttttttaacctntttaaaaaaangcnttttttttttaggttaact

SEQ ID NO: 1909 - DNA, 596 bp, Homo sapiens
  misc_feature (375)..(375): n equals a,t,g, or c
  misc_feature (382)..(382): n equals a,t,g, or c
  misc_feature (442)..(442): n equals a,t,g, or c
  misc_feature (460)..(460): n equals a,t,g, or c
  misc_feature (511)..(511): n equals a,t,g, or c
  misc_feature (528)..(528): n equals a,t,g, or c
  misc_feature (534)..(534): n equals a,t,g, or c
  misc_feature (567)..(567): n equals a,t,g, or c
  misc_feature (575)..(575): n equals a,t,g, or c
gggaagactaccaggctgcggaggagactgcttttgttgttgatgaagtgagcaacattgtaaaagaggctatagaaagcgcaattggtggtaacgcttatcaacacagcaaagtgaaccagtggaccacaaatgtagtagaacaaactttaagccaactcaccaagctgggaaaaccatttaaatacatcgtgacctgtgtaattatgcagaagaatggagctggattacacacagcaagttcctgcttctgggacagctctactgacgggagctgcactgtgcgatgggagaataagaccatgtactgcatcgtcagtgccttcggactgtctatttgacctgcagtccagcctatggcctttctccttttgnctctagntcatcctctaaccaccagccatgaattcagtgaactcttttctcattctctttggtttgnggcactttcacaatgtanaggaaaaaaccaaatgaccgcactgtgatgtgaatggcaccgaatcagatnagtatccttgtaggcanctgcanctgcgttgcacttgcttaactcttaaaattcanttcaaagngcttaaaactgaaactgctaa

SEQ ID NO: 1910 - DNA, 694 bp, Homo sapiens
  misc_feature (327)..(327): n equals a,t,g, or c
  misc_feature (611)..(611): n equals a,t,g, or c
  misc_feature (639)..(639): n equals a,t,g, or c
  misc_feature (654)..(654): n equals a,t,g, or c
  misc_feature (663)..(663): n equals a,t,g, or c
  misc_feature (686)..(686): n equals a,t,g, or c
gggccgggctcgtggtgcgtggaactcaagtgtcctacataggccaggactgcagagaaattccagagcaccttggcagggactgtggacatttcgcaaagaggcttgatctgagctttaaccttctgaggtcactggaaggactgagcgcattcaggagcctggaggaactcatcttggacaacaatcagctgggggacgaccttgtgttgccagggttacccagactgcataccttaaccctcaacaagaaccgaatcactgatttggagaacctgctggatcacttggcagaagtgacaccagctctggagtacctcagtctgntgggcaacgtggcctgtcccaacgagctggtcagcttggaaaaggatgaggaagactacaagagatacagatgctttgtctgtacaagctgcccaacttgaaatttctggatgcccagaaagtaaccagacaagaacgagaggaggcgttggtcaaaggagtcttcatgaaggtggtgaagcccaaggcttctagtgaggacgttgccagctcccggagcgccactacacgcccttgctttgcttcagggaactaccagtcaccaaggtgtcttgggaagtgcntagttacatgggaaaactaaggcacagntatccagatacagtntaagcactntgatacttacattatgaataaanaaaggaat

SEQ ID NO: 1911 - DNA, 717 bp, Homo sapiens
  misc_feature (286)..(286): n equals a,t,g, or c
  misc_feature (467)..(467): n equals a,t,g, or c
  misc_feature (525)..(525): n equals a,t,g, or c
  misc_feature (528)..(528): n equals a,t,g, or c
  misc_feature (545)..(545): n equals a,t,g, or c
  misc_feature (658)..(658): n equals a,t,g, or c
  misc_feature (677)..(677): n equals a,t,g, or c
  misc_feature (684)..(684): n equals a,t,g, or c
  misc_feature (689)..(689): n equals a,t,g, or c
  misc_feature (694)..(694): n equals a,t,g, or c
gcgcgtgtgtgcgcctaatctcaggtggtccacccgagaccccttgagcaccaaccctagtcccccgcgcggccccttattcgctccgacaagatgaaagaaacaatcatgaaccaggaaaaactcgccaaactgcaggcacaagtgcgcattggtgggaaaggaactgctcgcagaaagaagaaggtggttcatagaacagccacagcagatgacaaaaaacttcagttctccttaaagaagttaggggtaaacaatatctctggtattgaaaaggtgaatatgnttacaaaccaaggaacagtgattcactttaacaaccctaaagttcaggcatctctggcagcgaacactttcaccattacaggccatgctgagacaaagcagctgacagaaatgctacccagcatcttaaaccagcttggtgcggatagtctgactagtttaaggagactggccgaagcttntgcccaaacaatcttgtggatggaaaagcaccacttgctactggagaggatgatgatnatnaaagttccagattttgnggagaatttgatgaggctttcaagaatgaggcaaactgaattgagcaacttctgaagataaaccctgaaaaagtactgggaactgctatttaaaataatgactggtttttaanaaaatttggttatggactntaaaaantaaanctctnaaaattttaagccaaacccttgg

SEQ ID NO: 1912 - DNA, 707 bp, Homo sapiens
  misc_feature (24)..(24): n equals a,t,g, or c
  misc_feature (27)..(27): n equals a,t,g, or c
  misc_feature (30)..(30): n equals a,t,g, or c
  misc_feature (51)..(51): n equals a,t,g, or c
  misc_feature (53)..(53): n equals a,t,g, or c
  misc_feature (104)..(104): n equals a,t,g, or c
  misc_feature (549)..(549): n equals a,t,g, or c
  misc_feature (570)..(570): n equals a,t,g, or c
  misc_feature (613)..(613): n equals a,t,g, or c
  misc_feature (639)..(639): n equals a,t,g, or c
  misc_feature (651)..(651): n equals a,t,g, or c
  misc_feature (656)..(656): n equals a,t,g, or c
  misc_feature (666)..(666): n equals a,t,g, or c
ccggggcgcaacgaagggggggcnatnccngcatgggcccgctggtacgcntncaggtaccggtccggaattcccgggtcgacccacgcgtccgggcgaacgcngagagcacgccatgaaggcctcgggcacgctacgagagtacaaggtagtgggtcgctgcctgcccacccccaaatgccacacgccgcccctctaccgcatgcgaatctttgcgcctaatcatgtcgtcgccaagtcccgcttctggtactttgtatctcagttaaagaagatgaagaagtcttcaggggagattgtctactgtgggcaggtgtttgagaagtcccccctgcgggtgaagaacttcgggatctggctgcgctatgactcccggagcggcacccacaacatgtaccgggaataccgggacctgaccaccgcaggcgctgtcacccagtgctaccgagacatgggtgcccggcaccgcgcccgagcccactccattcagatcatgaaggtggaggagatcgcggccagcaagtgccgccggccgctgtcaagcagttncacgacttccagatcaagttnccgctgcccaccgggtcctgcgccgtcagacaaagcacgcttnaccaccaagaaggccaacacttcttntaagtgcaaggnccttngtccgggtgnggccccaaataaacttaaggaacgccccggttaaaaaaaaa

SEQ ID NO: 1913 - DNA, 387 bp, Homo sapiens
  misc_feature (12)..(13): n equals a,t,g, or c
  misc_feature (171)..(171): n equals a,t,g, or c
  misc_feature (242)..(242): n equals a,t,g, or c
  misc_feature (248)..(248): n equals a,t,g, or c
  misc_feature (257)..(257): n equals a,t,g, or c
  misc_feature (324)..(324): n equals a,t,g, or c
  misc_feature (342)..(342): n equals a,t,g, or c
  misc_feature (365)..(365): n equals a,t,g, or c
  misc_feature (380)..(380): n equals a,t,g, or c
  misc_feature (382)..(382): n equals a,t,g, or c
ggattaattggnntatttgcattatttaatttttttgattccaagttttggtcttgtaaccactataactctctgtgaacatttttccaggtggctggaagaaggaagaaaacctgatatagccaatgctgctgtagtcgtttcctcagcctcatctcactgtgctgtggnctgtcctcacatgtgcactggtaacagactcacacagctgatgaatgcttttctctccttatgtgtggaangagggnagcacttanacatttgctaactcccagaattggatcatctcctaagatggcttacttttttaaagtccaaatatgnttatatttaaatataccnggagcatggttcataatggttgnaatggattaatactnanccatt

SEQ ID NO: 1914 - DNA, 625 bp, Homo sapiens
  misc_feature (571)..(571): n equals a,t,g, or c
  misc_feature (577)..(577): n equals a,t,g, or c
  misc_feature (608)..(608): n equals a,t,g, or c
  misc_feature (617)..(617): n equals a,t,g, or c
  misc_feature (620)..(620): n equals a,t,g, or c
ggcacaccccacccggacgactttgccaatgacgacattgactcttacatgatcgccatggaaaccactataggcaatgagggctcgcgggtgctgccctccatttccctttcacctggcccccagccccccaagagccccggtccccactccgaggaggaagatgaggctgagcccagtacagtgcctgggactcccccacccaagaagttccgctcactgttcttcggctccatcctggcccctgtacgctccccccagggccccagccctgtgctggcggaagacagtgagggtgaaggctgaaccaagaacctgaagcctgtacccagaggccttggactagacgaagccccagccagtggcagaactgggtctctcagccctggggatcagaaaggtgggcttgctggagctgagctgtttcactgctctcgcaagccccagctggctgtcactgtaaagctgtccacagcggtcggcctggccgtatctcccacaaccccagccaatcagacttcagactggcctgactatgacgtctactctattctattggctagcttctcantgcagntgaactgtctagtactctaagaatgaagagntgtgcctgncantttca

SEQ ID NO: 1915 - DNA, 665 bp, Homo sapiens
  misc_feature (289)..(289): n equals a,t,g, or c
  misc_feature (294)..(294): n equals a,t,g, or c
  misc_feature (547)..(547): n equals a,t,g, or c
  misc_feature (555)..(555): n equals a,t,g, or c
  misc_feature (598)..(598): n equals a,t,g, or c
  misc_feature (604)..(604): n equals a,t,g, or c
  misc_feature (607)..(607): n equals a,t,g, or c
  misc_feature (657)..(657): n equals a,t,g, or c
  misc_feature (664)..(664): n equals a,t,g, or c
gggctccctgacctatacaggcctctgctatgggggtgatggccagtcctggtgtctgagtgattcccagggcccagcaaagggaccaagtttccagagccctgaagacaaggggtaacactccaaaatatggactcattttccactccaccttcattggccgagcagctgccaagaacaaaggccgcatctcccgatacctggcaaacaaatgcagtattgcctcacgaatcgattgcttctctgaggtgcccacgagtgtattcggggagaagcttcgagaacaagntgaanaaccgactggtccttctatgagactggagagataccacgaaagaatctggatgtcatgaaggaagcaatggttcaggcagaggaagcggctgctgagattactaggaagctggagaaacaggagaagaaacgcttaaagaaggaaaagaaacggctgctgcacttgccctcgcgtcttcagaaaacagcagtagtacttcagaggagtgtgaggagatgagtgaaaaacccaaaaagaagaaaaagcaaaagncccaagangttcttcaggagaatgggaatggaagaaccatctatctctttntcaaanccnagaaaaagaaacttttttcaaggaggaatttattaatacgacttgaaaanacgttgna

SEQ ID NO: 1916 - DNA, 743 bp, Homo sapiens
  misc_feature (19)..(19): n equals a,t,g, or c
  misc_feature (601)..(601): n equals a,t,g, or c
  misc_feature (621)..(621): n equals a,t,g, or c
  misc_feature (649)..(649): n equals a,t,g, or c
  misc_feature (664)..(664): n equals a,t,g, or c
  misc_feature (687)..(687): n equals a,t,g, or c
  misc_feature (704)..(704): n equals a,t,g, or c
  misc_feature (716)..(716): n equals a,t,g, or c
ggagactgtgaattttaanaccctcctacagctagatcttttctgtagaaatcagggaaaatggtctgaaatatcctatgtgcaaacctttatggcctgacaacaaaacccagctctatgcagcacctgtgggctaaagcctagtaagccacaaagcccctcagaagcattagaagatcatctcttattaaggggaagggaccccagacccaacagcccaacaccagctccagatagggaccctcaggggcctacacctcctgtagaatccgcagcatccccacactatccgagtcttctgcagaatctaagcttgtttcacctcctccttatgctcctctctatcagcctttgccaggtacaatagtgaccagcccagctgtagttactcgcggtggaacttcacaccatgcagggccagagaatttgatccccttacagaaagtcccaaatggagagaggaccatcagagtgcttggtctcttctcaataaatgatctaatccaatgcaagcaacagctctgttggcttccaaagaacttcaaggcatttactggaagcctttcaggctctaactttgacaccattcaacttcaccatncataatggcccaatgactgntgacacggagctggaagaaaacttttgntaatgggcaaaaatngaaagacttaaaacttttgctgntttcaccattttaaagnagaattccttgngggacaaatgtaccataagggggacct

SEQ ID NO: 1917 - DNA, 704 bp, Homo sapiens
  misc_feature (535)..(535): n equals a,t,g, or c
  misc_feature (555)..(555): n equals a,t,g, or c
  misc_feature (615)..(615): n equals a,t,g, or c
  misc_feature (617)..(617): n equals a,t,g, or c
  misc_feature (702)..(704): n equals a,t,g, or c
gcccggacccctgaggtcacatgcgtggtggtggacgtgagccacgaagaccctgaggtcaagttcaactggtacgtggacggcgtggaggtgcataatgccaagacaaagccgcgggaggagcagtacaacagcacgtaccgtgtggtcagcgtcctcaccgtcctgcaccaggactggctgaatggcaaggagtacaagtgcaaggtctccaacaaagccctcccagcccccatcgagaaaaccatctccaaagccaaagggcagccccgagaaccacaggtgtacaccctgcccccatcccgggaggagatgaccaagaaccaggtcagcctgacctgcctggtcaaaggcttctatcccagcgacatcgccgtggagtgggagagcaatgggcagccggagaacaactacaagaccacgcctcccgtgctggactccgacggctccttcttcctctatagcaagctcaccgtggacaagagcaggtggcagcaggggaacgtcttctcatgctccgtgatgcatgaggctntgcacaaccactacacgcanaagagcttttccttgtcccggtaaatgaatgcgacggccggaaggccccgttcccggctntngcggtcgacgagatcttgcacgtacccgttactattccagcaccacatggaataagaccacactgctggccctggaaaaaaaaannn

SEQ ID NO: 1918 - DNA, 509 bp, Homo sapiens
  misc_feature (461)..(461): n equals a,t,g, or c
  misc_feature (506)..(509): n equals a,t,g, or c
ggagaagtctgccactatgcctgcagctctacgccccagggctgtcgccagacactatcatggagtgtgcaatgggggaccgcggcatgcagctcatgcacgccaacgcccagcggacagatgctctccagccaccgcacgagtatgtgccctgggtcaccgtcaatgggaaacccttggaagatcagacccagctccttacccttgtctgccagttgtaccagggcaagaagccggatgtctgcccttcctcaaccagctccctcaggagtgtttgcttcaagtgatggccggtgagctgcggagagctcatggaaggcgagtgggaacccggctgcctgcctttttttctgatccagaccctcggcacctgctacttaccaactggaaaattttatgcatcccatgaagcccagatacacaaaattccaccccatgatcaagaatcctgcttcactaanaatggtgctaaagtaaaactaggttaataagcccttaaaaaaaannnn

SEQ ID NO: 1919 - DNA, 551 bp, Homo sapiens
  misc_feature (199)..(199): n equals a,t,g, or c
  misc_feature (404)..(404): n equals a,t,g, or c
  misc_feature (454)..(454): n equals a,t,g, or c
  misc_feature (500)..(500): n equals a,t,g, or c
  misc_feature (525)..(525): n equals a,t,g, or c
  misc_feature (537)..(537): n equals a,t,g, or c
  misc_feature (543)..(543): n equals a,t,g, or c
gagcggagccgtgaggacctctcagctctgacccgacagggccgctacccgccctacgaacgagtggtgttgcgagaagccagtttcaagcgcccggtagtgatcctgggacccgtggccgacattgctatgcagaagttgactgctgagatgcctgaccagtttgaaatcgcagagactgtgtccaaggaccgacagnccctccaagatcatcaaactagacaccgtgcgggtgattgcagaaaaagacaagcatgcgctcctggatgtgaccccctccgccatcgagcgcctcaactatgtgcagtactaccccattgtggtcttcttcatccccgagagccggccggcctcaaggcactgcgccagtggctggcgcctgcctcccgccgcagacccgtcgnctctaccacaagcccagaactgcgaaaacacagcagccacctcttacagncaccatccctctgaatggcacgagtgacacctggtaccaggagctnaaggccatcattcgagagcaagcanacgcgggccatntggacngcggaaga

SEQ ID NO: 1920 - DNA, 308 bp, Homo sapiens
  misc_feature (80)..(80): n equals a,t,g, or c
  misc_feature (163)..(163): n equals a,t,g, or c
  misc_feature (169)..(169): n equals a,t,g, or c
  misc_feature (181)..(181): n equals a,t,g, or c
  misc_feature (183)..(183): n equals a,t,g, or c
  misc_feature (241)..(241): n equals a,t,g, or c
  misc_feature (248)..(248): n equals a,t,g, or c
  misc_feature (257)..(257): n equals a,t,g, or c
  misc_feature (303)..(304): n equals a,t,g, or c
gtccacgcagtccgcccacgcgtccggctagaactgctgtgctgatcaacagggacgctccgtctttgaagaaagaaganatggtctctccccagccatgggccacccttgccagtgactccaagtggaactacttagctcgagtgcgcctggagggtgcggnaagtcnagcgactctcanangcaccctcccagaggaccggtgggaattgctcatagtgccaaagtcctactactgcgntttcagngggtccttngtacataccttgctctctgcctagccctcacctcttgctatactgnnaacc

SEQ ID NO: 1921 - DNA, 622 bp, Homo sapiens
  misc_feature (7)..(7): n equals a,t,g, or c
  misc_feature (12)..(13): n equals a,t,g, or c
  misc_feature (15)..(15): n equals a,t,g, or c
  misc_feature (38)..(38): n equals a,t,g, or c
  misc_feature (102)..(102): n equals a,t,g, or c
  misc_feature (120)..(120): n equals a,t,g, or c
  misc_feature (126)..(126): n equals a,t,g, or c
  misc_feature (182)..(182): n equals a,t,g, or c
  misc_feature (191)..(191): n equals a,t,g, or c
  misc_feature (195)..(195): n equals a,t,g, or c
  misc_feature (236)..(236): n equals a,t,g, or c
  misc_feature (251)..(251): n equals a,t,g, or c
  misc_feature (275)..(275): n equals a,t,g, or c
  misc_feature (298)..(298): n equals a,t,g, or c
  misc_feature (304)..(304): n equals a,t,g, or c
  misc_feature (323)..(323): n equals a,t,g, or c
  misc_feature (340)..(341): n equals a,t,g, or c
  misc_feature (345)..(345): n equals a,t,g, or c
  misc_feature (352)..(352): n equals a,t,g, or c
  misc_feature (376)..(378): n equals a,t,g, or c
  misc_feature (382)..(382): n equals a,t,g, or c
  misc_feature (384)..(386): n equals a,t,g, or c
  misc_feature (400)..(400): n equals a,t,g, or c
  misc_feature (402)..(402): n equals a,t,g, or c
  misc_feature (419)..(419): n equals a,t,g, or c
  misc_feature (442)..(442): n equals a,t,g, or c
  misc_feature (480)..(480): n equals a,t,g, or c
  misc_feature (483)..(483): n equals a,t,g, or c
  misc_feature (493)..(493): n equals a,t,g, or c
  misc_feature (495)..(495): n equals a,t,g, or c
  misc_feature (546)..(547): n equals a,t,g, or c
  misc_feature (569)..(570): n equals a,t,g, or c
  misc_feature (594)..(594): n equals a,t,g, or c
ttctatnggaanncncgactcactatagggaaagctgntacagcctgcaggtaccaggtccggaattcccgggtcagacccacgcgttcgcccacgcgccgnccacagcgtccgcaggcncccagnccgccctgcacgtccaggcgcaggtgaacaacagcaacaacaagaagggtaccttnacggacganctgnacaagctggtggacgagtggacgagcaagacggtgggggcngcgcagctgaagccnacgctcaaccagctgaagcagacncagaagctgtaagatatggaggnccaggnaggctgggctgcccctggngaggtgcgggctatganngtancttgagnaggagtggggatgtcgtgtctgtnnncagngnnnggcctctgtccacnanggtcattcctggagcgncctgatcctgtccgtgccatatnagattctgagagtgagaagtctgactgatccgctagangtnaggccacttnangctgtctaagtggagaagtgatggacctcagggcagctgtcctctgccagnnatgtgtttgaacactttctaannatttttattcacaattggaaacanaaatgtaatgcacgaataaaaatatttg

SEQ ID NO: 1922 - DNA, 334 bp, Homo sapiens
  misc_feature (19)..(19): n equals a,t,g, or c
  misc_feature (44)..(44): n equals a,t,g, or c
  misc_feature (46)..(46): n equals a,t,g, or c
  misc_feature (48)..(48): n equals a,t,g, or c
  misc_feature (78)..(79): n equals a,t,g, or c
  misc_feature (99)..(99): n equals a,t,g, or c
  misc_feature (129)..(129): n equals a,t,g, or c
  misc_feature (139)..(139): n equals a,t,g, or c
  misc_feature (159)..(159): n equals a,t,g, or c
  misc_feature (193)..(193): n equals a,t,g, or c
  misc_feature (267)..(267): n equals a,t,g, or c
  misc_feature (271)..(271): n equals a,t,g, or c
  misc_feature (313)..(313): n equals a,t,g, or c
  misc_feature (320)..(320): n equals a,t,g, or c
  misc_feature (328)..(328): n equals a,t,g, or c
  misc_feature (332)..(332): n equals a,t,g, or c
  misc_feature (334)..(334): n equals a,t,g, or c
gatacgctgctggcctggnagctggacctcggtcccagcttctnananagctcccgctctcacgctctccactgctannaaggcaaacctcgaactctnaccagatctcactctccaggggcccgctcnatcccagcanagcaaccggaccctggccgntctgccactcaccttcctgccgtgaatgcacccnatccatggaggccctgcttccctgccaggtgtcttcacctcctcccctctcctcccctctgagcactgtgaacncganaacaaatcttctttgacaataaaccgtgtgattcgtggaatnataaaanaaaaaaanaaancn

SEQ ID NO: 1923 - DNA, 334 bp, Homo sapiens
  misc_feature (6)..(6): n equals a,t,g, or c
  misc_feature (33)..(33): n equals a,t,g, or c
  misc_feature (38)..(38): n equals a,t,g, or c
  misc_feature (61)..(61): n equals a,t,g, or c
  misc_feature (78)..(78): n equals a,t,g, or c
  misc_feature (99)..(99): n equals a,t,g, or c
  misc_feature (108)..(108): n equals a,t,g, or c
  misc_feature (127)..(127): n equals a,t,g, or c
  misc_feature (132)..(132): n equals a,t,g, or c
  misc_feature (141)..(141): n equals a,t,g, or c
  misc_feature (163)..(163): n equals a,t,g, or c
  misc_feature (179)..(179): n equals a,t,g, or c
  misc_feature (190)..(191): n equals a,t,g, or c
  misc_feature (227)..(227): n equals a,t,g, or c
  misc_feature (264)..(264): n equals a,t,g, or c
  misc_feature (276)..(276): n equals a,t,g, or c
  misc_feature (285)..(285): n equals a,t,g, or c
  misc_feature (296)..(296): n equals a,t,g, or c
  misc_feature (298)..(298): n equals a,t,g, or c
  misc_feature (310)..(310): n equals a,t,g, or c
  misc_feature (323)..(323): n equals a,t,g, or c
ggccgntgtccgtccatcgacatggacacgcangagcngcatcaaggcggagcgcaagcgnctgcgcaaccgcatcgncgcctccaagtgcctgcaagngcaagctgnagccgcatctcgcgcctgnaaganaaagtgaanaccctcaagagtcacaacacgnagctggcgtccacggncagcctgctgnncgagcaggtggcgcacctcaagcagaaagtcctcanccaccgtcaacagctggctgtcagctgctgccccagnaccaggtgcccntgtactgantccgcgcgcgncncgcatgcgcggncaccctccccaangggtgggctcg

SEQ ID NO: 1924 - DNA, 694 bp, Homo sapiens
  misc_feature (1)..(2): n equals a,t,g, or c
  misc_feature (610)..(610): n equals a,t,g, or c
  misc_feature (633)..(633): n equals a,t,g, or c
  misc_feature (665)..(665): n equals a,t,g, or c
  misc_feature (679)..(679): n equals a,t,g, or c
nngagtgtgctgctgtctctagaaagatgaaatgtgtgcttctcctgtttgttaaagctcttttgggggtcccagtgaaagcaagcataggtgaacgatcaggagcacatcagtgaggaacgcatgttcagaagcccccatgatgctccttttcttcctcttaagcctggctctgacagtggtacaacagcggtggtggccctgatacgagggaagcagttgattgtagccaacgcaggagactctcgctgtgtggtatctgaggctggcaaagctttagacatgtcctatgatcacaaaccagaggatgaagtagaactagcacgcatcaagaatgctggtggcaaggtcaccatggatgggcgagtcaacgggggcctcaacctctccagagccattggggaccacttctataagagaaacaagaacctgccacctgaggaacagatgatttcagcccttcctgacatcaaggtgctgactctcactgacgaccatgaattcatggtcattgcctgtgatggcatctggaatgtgatgagcagccaggaagttgtagatttcattcaatcaaagatcaaccagcgtgatgaaaatggggagcttcggntattggcatccattgtggaaganctgctggatcagtgcctggcaccagacacttntggggatggtacanggtgtgacaacatga

SEQ ID NO: 1925 - DNA, 548 bp, Homo sapiens
  misc_feature (506)..(506): n equals a,t,g, or c
  misc_feature (535)..(535): n equals a,t,g, or c
gatcacactcaaaagcaaagcattctcttcccagtgcctatcggacagtgcggcggtcgaggtcccgctcccggtcccctcggaggagagcccactcccctgagagacggagggaagagaggagtgtgcccactgcctaccgcgtgagccgcagccctggggccagcaggaagcggacccgctccagaagtccccacgagaagaagaagaagaggcggtcccggtcgcggaccaagtccaaggccaggtctcagtcggtgtcacccagcaagcaggcagcgccccggcccgcggcccccgcggcccactcggcgcactcagccagcgtctcccctgtggagagtcggggctccagccaggagcgctccaggggagtctctcaggaaaaagaagcccagatctcttcagcaatcgtttcttccgtgcagagcaaaatcactcaggatctcatggccaaagtcagagcgatgcttgcagcttccaaaaacctgcaaaccaagcgcttnctgagacgggccagcggagcagaaccggnaggctggtggctt

SEQ ID NO: 1926 - DNA, 697 bp, Homo sapiens
  misc_feature (17)..(17): n equals a,t,g, or c
  misc_feature (47)..(47): n equals a,t,g, or c
  misc_feature (54)..(54): n equals a,t,g, or c
  misc_feature (90)..(90): n equals a,t,g, or c
  misc_feature (94)..(94): n equals a,t,g, or c
  misc_feature (186)..(186): n equals a,t,g, or c
  misc_feature (255)..(255): n equals a,t,g, or c
  misc_feature (292)..(292): n equals a,t,g, or c
  misc_feature (356)..(356): n equals a,t,g, or c
  misc_feature (359)..(359): n equals a,t,g, or c
  misc_feature (386)..(386): n equals a,t,g, or c
  misc_feature (438)..(438): n equals a,t,g, or c
  misc_feature (462)..(462): n equals a,t,g, or c
  misc_feature (546)..(546): n equals a,t,g, or c
  misc_feature (553)..(553): n equals a,t,g, or c
  misc_feature (566)..(566): n equals a,t,g, or c
  misc_feature (587)..(587): n equals a,t,g, or c
  misc_feature (593)..(593): n equals a,t,g, or c
  misc_feature (620)..(621): n equals a,t,g, or c
  misc_feature (651)..(651): n equals a,t,g, or c
  misc_feature (675)..(675): n equals a,t,g, or c
  misc_feature (691)..(691): n equals a,t,g, or c
cgcctgcaggtaccggnccggaattcccgggtcgacccacgcgtccngccatgngtgctgctcggctagcggcggcggcggcggcccagncggngtatgccttctcggcgcgcccgctggccggcggggagcctgtgagcctgggctccctgcggggcaaggtactacttatcgagaatgtggcgnccctctgaggcaccacggtccgggactacacccagatgaacgagctgcagcggcgcctcggaccccggngcctggtggtgctcggcttcccgtgcaaccagtttgngcatcaggagaacgccaagaacgaagagattctgaattccctcaagtacgtccggcctggtggnggnttcgagcccaacttcatgctcttcganaagtgcgaggtgaacggtgcgggggcgcaccctctcttcgccttcctgcggnaggccctgccagctcccagcgacnacgccaccgcgcttatgaccgaccccaagctcatcacctggtctccggtgtgtcgcaacgattttgcctggaactttgagaaantcctggngggccctgacggngtgcccctacacaggtacagncgccgntttcaagaccattgacatcgagcctgnnatcgaaacccttgctgctcaagggctcaanctgtgcctaaggcgccccttctancccggatgcttggcantttgca

SEQ ID NO: 1927 - DNA, 645 bp, Homo sapiens
  misc_feature (8)..(8): n equals a,t,g, or c
  misc_feature (19)..(19): n equals a,t,g, or c
  misc_feature (22)..(22): n equals a,t,g, or c
  misc_feature (36)..(36): n equals a,t,g, or c
  misc_feature (85)..(85): n equals a,t,g, or c
  misc_feature (104)..(104): n equals a,t,g, or c
  misc_feature (160)..(160): n equals a,t,g, or c
  misc_feature (186)..(186): n equals a,t,g, or c
  misc_feature (215)..(215): n equals a,t,g, or c
  misc_feature (227)..(227): n equals a,t,g, or c
  misc_feature (232)..(232): n equals a,t,g, or c
  misc_feature (236)..(236): n equals a,t,g, or c
  misc_feature (239)..(239): n equals a,t,g, or c
  misc_feature (264)..(264): n equals a,t,g, or c
  misc_feature (269)..(269): n equals a,t,g, or c
  misc_feature (275)..(275): n equals a,t,g, or c
  misc_feature (300)..(300): n equals a,t,g, or c
  misc_feature (305)..(305): n equals a,t,g, or c
  misc_feature (310)..(311): n equals a,t,g, or c
  misc_feature (314)..(314): n equals a,t,g, or c
  misc_feature (320)..(320): n equals a,t,g, or c
  misc_feature (332)..(332): n equals a,t,g, or c
  misc_feature (343)..(343): n equals a,t,g, or c
  misc_feature (358)..(358): n equals a,t,g, or c
  misc_feature (364)..(364): n equals a,t,g, or c
  misc_feature (373)..(373): n equals a,t,g, or c
  misc_feature (379)..(379): n equals a,t,g, or c
  misc_feature (398)..(398): n equals a,t,g, or c
  misc_feature (408)..(408): n equals a,t,g, or c
  misc_feature (421)..(421): n equals a,t,g, or c
  misc_feature (425)..(425): n equals a,t,g, or c
  misc_feature (429)..(429): n equals a,t,g, or c
  misc_feature (487)..(488): n equals a,t,g, or c
  misc_feature (496)..(496): n equals a,t,g, or c
  misc_feature (530)..(530): n equals a,t,g, or c
  misc_feature (548)..(548): n equals a,t,g, or c
  misc_feature (590)..(590): n equals a,t,g, or c
  misc_feature (619)..(619): n equals a,t,g, or c
  misc_feature (641)..(641): n equals a,t,g, or c
aatccggnagcacttgganaanaagggaccccaggncagagactggagccattacttcaagatcatcgaggacctgagggctcanatcttcgcaaatactgtgnacaatgcccgcatcgttctgcatgattgacaatgcccgtcttgctgctgatgactntagagtcaagtatgagacagagctgnccatgcgccagtctgaggagaacgacatncatgggctccgnaaggncatngangacaccaatatcacacgactgcagntgganacaganatcgaggctctcaaggaggagctgntcttnatgannaanaaccangaagaggaagtnaaaggcctacnagcccagattgccanctctgnggtgaccgnggaggnagatgcccccaaatctcangacctcgccnagatcatggcatncatnctgncccaatatgacgagctggctcggaagaaccgagaggagctagacaagtactggctcannagattgangagagcaccacagtggtcaccacacaagctgctnaggttggagcttgctganacgacgctcacagagctgagacgtacagtccagtccttgganatcgaactggactccatgaggaaatcttnaaggccagcttgggagaacaancccg

SEQ ID NO: 1928 - DNA, 689 bp, Homo sapiens
  misc_feature (6)..(6): n equals a,t,g, or c
  misc_feature (14)..(14): n equals a,t,g, or c
  misc_feature (91)..(91): n equals a,t,g, or c
  misc_feature (640)..(640): n equals a,t,g, or c
  misc_feature (645)..(645): n equals a,t,g, or c
  misc_feature (662)..(662): n equals a,t,g, or c
  misc_feature (680)..(680): n equals a,t,g, or c
  misc_feature (683)..(683): n equals a,t,g, or c
cctttnggttaggnacctggcccgcctgcaggtaccggtccggaattcccgggtcgacccatttcgtttggaaaggtccaagcctgacagnagcgagtaggagtaaaggacatggagcggccagagtcctcagccacgctactcacagccatgggcaggagtctaatcagatgagagggaatgtgtgcgtgcccggggcccaccccacacctctcccgagtgtgcccatgtgcaccaggagacattgtcagtgggcctgcagccgcagtacttgggacaaaaaaagtccatcctcagtgggctagagagccagatcaaggagcatccagctcacgggctgtgattccatagtggaaactgatgagctacagccgtgtgcatcagggttactctcaggggcacagatttttttacaaaacaaatcacagaagagtcatacagtgtgactcaggttatagaataattaatacacaacaaaataactgttcaggggcaggtccttatgtgctaaagccatgaagacaagccggtgaagtcatgaccatggatggggagggggacacttcaagtctgggcaggggcattagtggatgcttgcccaagcccaggggagaggggacatgggttgtgggggttaagntaaanggtttaaaaaactattnttcagccggttgggtgcnggnggggtt

SEQ ID NO: 1929 - DNA, 602 bp, Homo sapiens
  misc_feature (7)..(7): n equals a,t,g, or c
  misc_feature (19)..(19): n equals a,t,g, or c
  misc_feature (31)..(32): n equals a,t,g, or c
  misc_feature (67)..(67): n equals a,t,g, or c
  misc_feature (402)..(402): n equals a,t,g, or c
  misc_feature (418)..(418): n equals a,t,g, or c
  misc_feature (422)..(422): n equals a,t,g, or c
  misc_feature (448)..(448): n equals a,t,g, or c
  misc_feature (496)..(496): n equals a,t,g, or c
  misc_feature (521)..(521): n equals a,t,g, or c
  misc_feature (528)..(528): n equals a,t,g, or c
  misc_feature (581)..(581): n equals a,t,g, or c
  misc_feature (587)..(587): n equals a,t,g, or c
  misc_feature (601)..(601): n equals a,t,g, or c
ggaatcntccgactcactntagggaaagctnntacgcctgcaggtaccggtccggaattcccgggtngacccacgcgttcggagaggctccagacccgcacgccgcgcgcacagagctctcagcgccgctcccagccacagcctcccgcgcctcgctcagctccaacatggcaaaaatctccagccctacagagactgagcggtgcatcgagtccctgattgctgtcttccagaagtatgctggaaaggatggttataactacactctctccaagacagagttcctaagcttcatgaatacagaactagctgccttcacaaagaaccagaaggaccctggtgtccttgaccgcatgatgaagaaactggacaccaacagtgatggtcagctagatttctcanaatttcttaatctgantggnggcctagctatggcttgccatgactnctttctcaagggtggcccttccagaagcggacctgaggaccccttggncctgggctttaaacccacccctttncttcaanctttttggcatcatttcccaggccaccatccctgaggacactaaccacttaangccggnccactggcaatagna

SEQ ID NO: 1930 - DNA, 434 bp, Homo sapiens
  misc_feature (331)..(331): n equals a,t,g, or c
gaagtagtaggataactcacaggatggatccactggaggttaagacatgtggtaagacagtgtaataggaagctgctcagttggagaaagtaaggaagcaaacattgttaccgtgggggcaatggagaggacagtgaggagccctttatcctgataagggtggctttggggtaaaggaaggaaagaggatgccttgagaggccccactgtattagagaggacctggaagccaggatgctaattctggggagatgggttccccaggcttactctaggagtagaggtccatgggacgagggtttgatttgagaaagatcattttcttgggagngggtggtgtgagctagacccttggagctgggataaaggaccttttaacccactgagaggtgctgcaataaatggaattgccctgggggtgagcaacagaaact

SEQ ID NO: 1931 - DNA, 480 bp, Homo sapiens
  misc_feature (316)..(316): n equals a,t,g, or c
  misc_feature (380)..(380): n equals a,t,g, or c
  misc_feature (421)..(421): n equals a,t,g, or c
  misc_feature (441)..(442): n equals a,t,g, or c
  misc_feature (460)..(460): n equals a,t,g, or c
  misc_feature (480)..(480): n equals a,t,g, or c
ggggtgcttgaccacacgtgaagactcagaactaacccaggcagcctggaactcggagaggtgatgagcagaacttactcgcattggggaaaggatgggtagggacccttgggtatatctgggactctggcagtggtgctttcctccctccgcccccctcaccacttaccagaataaaaaaccgggaatgagaagaccactttgggttactgtaacacctgcactagtgagtgaccacgccccctttcctcttccccctcgcccccttgctgctgggccacagcccagaatcccagggagtgatcagcggtgctgntttccttatcatcctcttctgcttcatccctttccccttcctgaactgctttgtgaaggagcangtgtaaggcattccccaccatgaagtaagtgggtttcgtgngggtgaatgcctgtggctgnnaactgggtaggacctganaaaactggggttattgggcn

SEQ ID NO: 1932 - DNA, 616 bp, Homo sapiens
  misc_feature (416)..(416): n equals a,t,g, or c
  misc_feature (470)..(470): n equals a,t,g, or c
  misc_feature (482)..(482): n equals a,t,g, or c
  misc_feature (507)..(507): n equals a,t,g, or c
  misc_feature (510)..(510): n equals a,t,g, or c
  misc_feature (514)..(514): n equals a,t,g, or c
  misc_feature (516)..(516): n equals a,t,g, or c
  misc_feature (547)..(547): n equals a,t,g, or c
  misc_feature (567)..(567): n equals a,t,g, or c
  misc_feature (583)..(583): n equals a,t,g, or c
  misc_feature (585)..(585): n equals a,t,g, or c
gcccacgcgtccggcaggaggcccctggcccagcggcccctcccacacacacacacacacactcgcccgcccactgtcctgggcgccctggaagccggcggcccaagcccgacttgctgttttgttctgtggttttcccctccctgggttcagaaatgctgcctgcctgtctgtctctccatctgtttggtgggggtagagctgatccagagcacagatctgtttcgtgcattggaagaccccacccaagcttggcagccgagctcgtgtatcctggggctcccttcatctccagggagtcccctccccggccctaccagcgcccgctgggctgagcccctaccccacaccaggccgtcctcccgggccctcccttggaaacctgcctgctgaggcccctctgccagttggcccantgggcttgcacctactgtcaggtccggcccgtgaggataggcgtagaggctganatactgaagatngaggacaaccacttgtgagctgagngtntggntncagccaggcatgatgctgaggggtggatggntggcagctcttgagtacttngctcctgcgtgaccantntgaaaattgtcgtctaaaaaaaaaaaaaaat

SEQ ID NO: 1933 - DNA, 471 bp, Homo sapiens
  misc_feature (19)..(19): n equals a,t,g, or c
  misc_feature (32)..(32): n equals a,t,g, or c
  misc_feature (70)..(70): n equals a,t,g, or c
  misc_feature (86)..(86): n equals a,t,g, or c
  misc_feature (102)..(102): n equals a,t,g, or c
  misc_feature (118)..(118): n equals a,t,g, or c
  misc_feature (121)..(121): n equals a,t,g, or c
  misc_feature (178)..(178): n equals a,t,g, or c
  misc_feature (184)..(184): n equals a,t,g, or c
  misc_feature (224)..(224): n equals a,t,g, or c
  misc_feature (232)..(232): n equals a,t,g, or c
  misc_feature (242)..(242): n equals a,t,g, or c
  misc_feature (255)..(255): n equals a,t,g, or c
  misc_feature (290)..(290): n equals a,t,g, or c
  misc_feature (292)..(292): n equals a,t,g, or c
  misc_feature (301)..(301): n equals a,t,g, or c
  misc_feature (303)..(303): n equals a,t,g, or c
  misc_feature (306)..(306): n equals a,t,g, or c
  misc_feature (329)..(329): n equals a,t,g, or c
  misc_feature (336)..(336): n equals a,t,g, or c
  misc_feature (338)..(338): n equals a,t,g, or c
  misc_feature (379)..(379): n equals a,t,g, or c
  misc_feature (395)..(395): n equals a,t,g, or c
  misc_feature (400)..(400): n equals a,t,g, or c
  misc_feature (421)..(421): n equals a,t,g, or c
  misc_feature (452)..(452): n equals a,t,g, or c
  misc_feature (463)..(463): n equals a,t,g, or c
gcgaatgctttcagttcangtagatgtttggntaaccggaaacaggtgggtcacctcctgcaagaagtgntgcctcaagctgtcantcatcatggcgctatnctctgaacccctcagntgncactgcaacagtgggcttaagggtgtctgagcaggagaggaaagataagctcttcgnggtgcncacgatgctcaggtttggtaacccggtagtgttcccaggnggccttanaaagcaaagnttgtaactggcangggatgatgtcagattcagcccaaggttcctcctntnctaccaagnangangccaggaacttctttggacttgnaaggtgngnggaactgcccgaggcccctgcaccctgcgcatcaggactgnttcatcgcttgctganaaagngaatagacacacaagtcgagngagttggagaagccagaagccattccacctncccttccccancatctctc

SEQ ID NO: 1934 - DNA, 371 bp, Homo sapiens
  misc_feature (308)..(308): n equals a,t,g, or c
  misc_feature (323)..(323): n equals a,t,g, or c
  misc_feature (353)..(353): n equals a,t,g, or c
  misc_feature (370)..(371): n equals a,t,g, or c
gcccacgcgtccgcccacgcgtccggtctggaaggcagatagcagccccgtcaaggcgggagtggagaccaccacaccctccaaacaaagcaacaacaagtacgcggccagcagctacctgagcctgacgcctgagcagtggaagtcccacagaagctacagctgccaggtcacgcatgaagggagcaccgtggagaagacagtggcccctacagaatgttcataggttctcaaccctcacccccaccacgggagactagagctgcaggatcccaggggaggggtctctccttccaccccaaggcatnaagcccttctcctgnacttaataaacccttaataaatattcttantggcaatcaaaaaaaann

SEQ ID NO: 1935 - DNA, 442 bp, Homo sapiens
  misc_feature (433)..(433): n equals a,t,g, or c
  misc_feature (437)..(439): n equals a,t,g, or c
  misc_feature (442)..(442): n equals a,t,g, or c
gctccaagatgacaaagaaaagaaggaacaatggtcgtgccaaaaagggccgcggccacgtgcagcctattcgctgcactaactgtgcccgatgcgtgcccaaggacaaggccattaagaaattcgtcattcgaaacatagtggaggccgcagcagtcagggacatttctgaagcgagcgtcttcgatgcctatgtgcttcccaagctgtatgtgaagctacattactgtgtgagttgtgcaattcacagcaaagtagtcaggaatcgatctcgtgaagcccgcaaggaccgaacacccccaccccgatttagacctgcgggtgctgccccacgtcccccaccaaagcccatgtaaggagctgagttcttaaagactgaagacaggctattctctggagaaaaataaaatggaaattgtacttaaaaaaaaanattnnnaan

SEQ ID NO: 1936 - DNA, 593 bp, Homo sapiens
  misc_feature (445)..(445): n equals a,t,g, or c
  misc_feature (453)..(453): n equals a,t,g, or c
  misc_feature (490)..(490): n equals a,t,g, or c
  misc_feature (515)..(515): n equals a,t,g, or c
  misc_feature (523)..(523): n equals a,t,g, or c
  misc_feature (541)..(541): n equals a,t,g, or c
  misc_feature (549)..(549): n equals a,t,g, or c
  misc_feature (566)..(566): n equals a,t,g, or c
ggtctgaagctccctggaggctcctgtatggcagcgctgacagtgacattgacggtgctgagctccccactggctttggctggggacacccaaccacgtttcttggagcaggctaagtgtgagtgtcatttcctcaatgggacggagcgagtgtggaacctgatcagatacatctataaccaagaggagtacgcgcgctacaacagtgacctgggggagtaccaggcggtgacggagctggggcggcctgacgctgagtactggaacagccagaaggacctcctggagcggaggcggcccgaggtggacacctactgcagatacaactaccggggtttgtggagagcttcacagtgcagcggcgagtccaacctaaggtgactgtgtatccttcaaagacccagcccctgcagcaccacaaccttctggtctgctctgtgaatgntttctatncaggcagcatttgaagtcaggtgggttccggaacggncaggaagagaagctggggtggtggnccacaggncttgatccaaaaaggaanactggganctttcaaaacctggggnatgcttgaaacaagttcttggaatgga

SEQ ID NO: 1937 - DNA, 328 bp, Homo sapiens
  misc_feature (29)..(29): n equals a,t,g, or c
  misc_feature (42)..(42): n equals a,t,g, or c
  misc_feature (50)..(50): n equals a,t,g, or c
  misc_feature (54)..(54): n equals a,t,g, or c
  misc_feature (61)..(61): n equals a,t,g, or c
  misc_feature (173)..(173): n equals a,t,g, or c
  misc_feature (194)..(194): n equals a,t,g, or c
  misc_feature (203)..(203): n equals a,t,g, or c
  misc_feature (219)..(219): n equals a,t,g, or c
  misc_feature (284)..(284): n equals a,t,g, or c
  misc_feature (293)..(293): n equals a,t,g, or c
  misc_feature (302)..(302): n equals a,t,g, or c
  misc_feature (317)..(317): n equals a,t,g, or c
  misc_feature (320)..(320): n equals a,t,g, or c
aaggcctccatattatacacctaaccagntagcacagatgangcctaatncacnctggcangaaggtgggagacctcaaggcttccaaggaatgccaagtgctatacgccagtctgatccttagatcaactcttctgccatctgggtacaactgggaatggttacggtctttntgaggggctccctactaccantcagagagnccggctttgtgtgccncggtcacgctttggctatggacttttggtaggcgcttgtggcccacccagcaagggcttgacttncagcttggncaccccttngaggttttttcccanagnctttgcca

SEQ ID NO: 1938 - DNA, 680 bp, Homo sapiens
  misc_feature (301)..(301): n equals a,t,g, or c
  misc_feature (342)..(342): n equals a,t,g, or c
  misc_feature (349)..(349): n equals a,t,g, or c
  misc_feature (470)..(471): n equals a,t,g, or c
  misc_feature (474)..(474): n equals a,t,g, or c
  misc_feature (493)..(493): n equals a,t,g, or c
  misc_feature (518)..(518): n equals a,t,g, or c
  misc_feature (535)..(535): n equals a,t,g, or c
  misc_feature (551)..(551): n equals a,t,g, or c
  misc_feature (566)..(566): n equals a,t,g, or c
  misc_feature (574)..(574): n equals a,t,g, or c
  misc_feature (596)..(596): n equals a,t,g, or c
  misc_feature (605)..(605): n equals a,t,g, or c
  misc_feature (636)..(636): n equals a,t,g, or c
  misc_feature (650)..(650): n equals a,t,g, or c
  misc_feature (659)..(659): n equals a,t,g, or c
gctttttcccgcccccagattgataagtaatgaaagtgcactgcagtgagggtcaaaggagagtcaacatatgtgattgttccataataaacttctggtgtgatactttcatcttgtaaatctgctttcttttgggaagatattgagatatttaaatcatggcccaccttacccaaaataggagattctgttcatctcatatctagtattaattagaaaaataactacataaaaagaaggaagctaagaaggcactcactcagccataaattctctaaaccctctctaccttggaatccgngaatggaatctggtatgttttttgcaggattttcctattgnaaattgnggcaaatacagggctcccttcatttgcttttcatctcttatgcatcaaaagtcaaaaacatttctgaatcaagataatctaagaagagaaaaaaaggaggaaaagggaaaagagaaagcannaanggaccaaataaaaagcaantgggcaaaaactggcaataataagnttatacacttaactatntcaataatcacaattntttgtaaataggctnaaacaatncaaataatttttacctctactnaggtaaaantttaacctttacaattggtaaagggtccccncttcaaattttacnaatcttggntttaaaaaaattaaaaaattc

SEQ ID NO: 1939 - DNA, 511 bp, Homo sapiens
  misc_feature (59)..(59): n equals a,t,g, or c
  misc_feature (65)..(66): n equals a,t,g, or c
accggcccggaattcccgggtcgacccacgcgtccgctgctacagagcaggagttgttngcagtnncaggctgagacagggtctggaacagaatctgacagtgatgaatcagtaccagagcttgaagaacaggattccacccaggcaaccacacaacaagcccagctggcggcagcagctgaaattgatgaagaaccagtcagtaaagcaaaacagagtcggagtgaaaagaaggcacggaaggctatgtccaaactgggtcttcggcaggttacaggagttactagagtcactatccggaaatctaagaatatcctctttgtcatcacaaaaccagatgtctacaagagccctgcttcagatacttacatagtttttggggaagccaagatcgaagatttatcccagcaagcacaactagcagctgctgagaaattcaaagttcaaggtgaagctgtctcaaacattcaagaaaacacacaagacttcaactgtacaagaggagagtgaa

SEQ ID NO: 1940 - DNA, 511 bp, Homo sapiens
  misc_feature (10)..(10): n equals a,t,g, or c
  misc_feature (102)..(102): n equals a,t,g, or c
  misc_feature (106)..(106): n equals a,t,g, or c
  misc_feature (396)..(396): n equals a,t,g, or c
gcctgcagcnaccggtccggaattcccgggtcgacccacgcgtccgtaatagcatttgaaacattttctaatagttatgatacttatacatgtgctttcagntttnttccttggtgaaacaattgttcaggggggatctaggtaattggcagattctaaataatataatttccagatagtaattttaagagtactcatcgctcttgccaaataagttcagggtattcaaatcttggactagtcctgcaaggtacaaagaataaaaatcccagtgagatacttggaaaccacagtttattattatttatctgggcaattattgtgtgtgtgaggatggaagggtagggaataatcgaacatctaaagccttgaataagagaatactaattgttttgntatgatgatactcagaaatggagatattataggaaaaagaaatcctttggaattttaactaaaatcactgcatatgggaaattaagagatccaggaccatatttgataagatttc

SEQ ID NO: 1941 - DNA, 786 bp, Homo sapiens
  misc_feature (2)..(2): n equals a,t,g, or c
  misc_feature (5)..(5): n equals a,t,g, or c
  misc_feature (18)..(18): n equals a,t,g, or c
  misc_feature (26)..(26): n equals a,t,g, or c
  misc_feature (75)..(75): n equals a,t,g, or c
  misc_feature (171)..(171): n equals a,t,g, or c
  misc_feature (495)..(495): n equals a,t,g, or c
  misc_feature (647)..(647): n equals a,t,g, or c
  misc_feature (671)..(671): n equals a,t,g, or c
  misc_feature (752)..(752): n equals a,t,g, or c
  misc_feature (762)..(762): n equals a,t,g, or c
  misc_feature (771)..(771): n equals a,t,g, or c
  misc_feature (774)..(774): n equals a,t,g, or c
  misc_feature (785)..(785): n equals a,t,g, or c
angcntcactttagggtnaggtgccncgcccgcaggtaccggtccggaattcccgggtcgacccacgcgtccgcnttggctttcgtgtcaggaaggtggctcttggagcgggacggagccttcctgccaagactccttcatgtacgacacccctcaagaggtggccgaagntttcctgtcttccctgacagagaccatagaaggagtcgatgctgaggatgggcacggcccaggggaacaacagaagcggaagatcgtcctggacccttcaggctccatgaacatctacctggtgctagatggatcagacagcattggggccagcaacttcacaggagccaaaaagtgtctagtcaacttaattgagaaggtggaatcctcctatccctgaactcgggggaatggaatctcgctgatcttccaggactagctccctgatcattccagcccctctgaacaacagggccccaggaaaatctccaggtcctattctgncctccttcccttttacttgaagcagtttcttgactggtaattcctccatgaacctcagcccttgagcctcttactgagagcctccctgtcccagcaaagtcgctgaaatctcccaatcacagtattctattttcaatgccatggcgccttgntctcctcacccacaggtggcaagntatggtgtgaagccaagatatggtctagtgacatatgccacataccccaaaatttgggtcaaagtgtctgaagcagacagnagtaatgcanactgggtcncgnacagttttaang

SEQ ID NO: 1942 - DNA, 633 bp, Homo sapiens
  misc_feature (12)..(12): n equals a,t,g, or c
  misc_feature (47)..(47): n equals a,t,g, or c
  misc_feature (60)..(61): n equals a,t,g, or c
  misc_feature (76)..(76): n equals a,t,g, or c
  misc_feature (137)..(137): n equals a,t,g, or c
  misc_feature (139)..(139): n equals a,t,g, or c
  misc_feature (152)..(152): n equals a,t,g, or c
  misc_feature (187)..(187): n equals a,t,g, or c
  misc_feature (193)..(193): n equals a,t,g, or c
  misc_feature (210)..(210): n equals a,t,g, or c
  misc_feature (244)..(244): n equals a,t,g, or c
  misc_feature (290)..(290): n equals a,t,g, or c
  misc_feature (306)..(306): n equals a,t,g, or c
  misc_feature (362)..(362): n equals a,t,g, or c
  misc_feature (371)..(371): n equals a,t,g, or c
  misc_feature (434)..(434): n equals a,t,g, or c
  misc_feature (438)..(438): n equals a,t,g, or c
  misc_feature (499)..(499): n equals a,t,g, or c
  misc_feature (501)..(501): n equals a,t,g, or c
  misc_feature (568)..(568): n equals a,t,g, or c
  misc_feature (590)..(590): n equals a,t,g, or c
  misc_feature (614)..(614): n equals a,t,g, or c
  misc_feature (619)..(619): n equals a,t,g, or c
  misc_feature (623)..(623): n equals a,t,g, or c
ggtaaaacgccngcaggtaccggtccggaattcccgggtcgacccangcgtccggtcaannggaaacaaaaaatgntgagttttaaaaatcaggattgacttttttctccaaaaccatacatttatgggcaaattgngntctttatcactgncgagcaaatactcagatttaaaattactttaaagncctggnacttaacaggctaacgnagataaacaccttaataatctcagttaatactgnatttcaaaacacatttaactggtttctaatgctttgcattatcagntacaacctagagagantttgagcctcatatttctttgatacttgaaatagagggagctagaacacttaatgnttaatctgntaaacctgctgcaagagccataactttgaggcattttctaaatgaactgtggggatccagganttgnaatttcttgatctaaactttatgctgcataaatcacttatcggaaatgcacatttcatagngngaagcactcatttctaaaccttaatatctaagggaatatatgcacctttcagaaatttgggtcgagnaaggaaaggatattagaataantggggggtgacagaattttaaaanagaantaanagatttgggg

SEQ ID NO: 1943 - DNA, 587 bp, Homo sapiens
  misc_feature (473)..(473): n equals a,t,g, or c
  misc_feature (525)..(525): n equals a,t,g, or c
  misc_feature (578)..(579): n equals a,t,g, or c
  misc_feature (584)..(585): n equals a,t,g, or c
ggcggcttctcggccgccgccaagctcgtctcagagaagctggcctcctaccaggctgcgcgcaaagacagcggcagcccgaaccccgcccgcggccacagcgtctgctccacctccagcttgtacctgcaggatctgagcgccgccgcttcagagtgcatcgacccctcggtggtcttcccctaccctctcaacgacagcagctcgcccaagtcctgcgcctcgcaagactccagcgccttctctccgtcctcggattctctgctctcctcgacggagtcctccccgcagggcagccccgagcccctggtgctccatgaggagacaccgcccaccaccagcagcgactctgaggaggaacaagaagatgaggaagaaatcgatgttgtttctgtggaaaagaggcaggctcctggcaaaaggtcagagtctggatcaccttctgctggaggccacagcaaacctcctacagnccactggtcctcaagaggtgccacgtctccacacatcagcacaactacgcanggcctccttcactcggaaggactatcctgcttgccaagaagggtcaaagttgnncaagnnca

SEQ ID NO: 1944 - DNA, 815 bp, Homo sapiens
  misc_feature (19)..(19): n equals a,t,g, or c
  misc_feature (23)..(23): n equals a,t,g, or c
  misc_feature (29)..(29): n equals a,t,g, or c
  misc_feature (41)..(41): n equals a,t,g, or c
  misc_feature (81)..(81): n equals a,t,g, or c
  misc_feature (208)..(208): n equals a,t,g, or c
  misc_feature (246)..(246): n equals a,t,g, or c
  misc_feature (253)..(253): n equals a,t,g, or c
  misc_feature (269)..(270): n equals a,t,g, or c
  misc_feature (284)..(284): n equals a,t,g, or c
  misc_feature (295)..(295): n equals a,t,g, or c
  misc_feature (322)..(322): n equals a,t,g, or c
  misc_feature (344)..(344): n equals a,t,g, or c
  misc_feature (346)..(346): n equals a,t,g, or c
  misc_feature (383)..(383): n equals a,t,g, or c
  misc_feature (391)..(391): n equals a,t,g, or c
  misc_feature (425)..(425): n equals a,t,g, or c
  misc_feature (443)..(443): n equals a,t,g, or c
  misc_feature (453)..(453): n equals a,t,g, or c
  misc_feature (465)..(465): n equals a,t,g, or c
  misc_feature (471)..(471): n equals a,t,g, or c
  misc_feature (485)..(485): n equals a,t,g, or c
  misc_feature (488)..(488): n equals a,t,g, or c
  misc_feature (494)..(494): n equals a,t,g, or c
  misc_feature (498)..(498): n equals a,t,g, or c
  misc_feature (517)..(517): n equals a,t,g, or c
  misc_feature (520)..(520): n equals a,t,g, or c
  misc_feature (535)..(535): n equals a,t,g, or c
  misc_feature (537)..(538): n equals a,t,g, or c
  misc_feature (559)..(559): n equals a,t,g, or c
  misc_feature (568)..(568): n equals a,t,g, or c
  misc_feature (573)..(573): n equals a,t,g, or c
  misc_feature (576)..(576): n equals a,t,g, or c
  misc_feature (583)..(583): n equals a,t,g, or c
  misc_feature (585)..(585): n equals a,t,g, or c
  misc_feature (625)..(625): n equals a,t,g, or c
  misc_feature (640)..(640): n equals a,t,g, or c
  misc_feature (652)..(652): n equals a,t,g, or c
  misc_feature (704)..(704): n equals a,t,g, or c
  misc_feature (760)..(760): n equals a,t,g, or c
  misc_feature (779)..(779): n equals a,t,g, or c
  misc_feature (786)..(786): n equals a,t,g, or c
  misc_feature (798)..(799): n equals a,t,g, or c
atagatcttcgactggaanggcncgcttncaggttccggtncggaacccccgggtcgacccacgcgtccgcggaggcgttnagctgcttcaagatgaagctgaacatctccttcccagccactggctgccagaaactcattgaagtggacgatgaacgcaaacttcgtactttctatgagaaagcggtatgggccacagaaagttggntggtgaacgcttctggggtgaaaaaatgggaaaggggntaatggngggtcccgaaatcaanngggtggggaaacgnacaaaacaaanggttttccccatgaaagcagggtggtnttggacccatgggcccgtggtncngcctgctactgagtaagggggcaattcctgttacagnaccaaggnagaaactgggagaaaaggaaaggaagaaaaaatnaagtttcgggggtttggnaattgggggnaatgcaaaaatnttgaancggtttcttaaaanttngggttnaatngggaaaaaaaaaagggaanaanaaagggaataatttncnngggaactggaactggaaaaanttaacaggnggccnttnggccggncntgggggccccccaaaaaggaagcttaggcaagaaattccnggaaaaacttttttnaaaatcttcttnttaaaggaaagaatgaatggtccgccaagtatggttggaaagaaaaggcccnttaaattaaaggaaaggtaaggaaaacctaggaccaaaggaacccaagaattaaanggcttggtactcacgtgtnctggagnacaaacgggggnnaatggtctgaaaaaca

SEQ ID NO: 1945 - DNA, 750 bp, Homo sapiens
  misc_feature (257)..(257): n equals a,t,g, or c
  misc_feature (267)..(267): n equals a,t,g, or c
  misc_feature (270)..(270): n equals a,t,g, or c
  misc_feature (280)..(280): n equals a,t,g, or c
  misc_feature (283)..(283): n equals a,t,g, or c
  misc_feature (289)..(290): n equals a,t,g, or c
  misc_feature (294)..(294): n equals a,t,g, or c
  misc_feature (296)..(298): n equals a,t,g, or c
  misc_feature (300)..(300): n equals a,t,g, or c
  misc_feature (305)..(305): n equals a,t,g, or c
  misc_feature (307)..(308): n equals a,t,g, or c
  misc_feature (313)..(314): n equals a,t,g, or c
  misc_feature (319)..(319): n equals a,t,g, or c
  misc_feature (328)..(328): n equals a,t,g, or c
  misc_feature (331)..(331): n equals a,t,g, or c
  misc_feature (346)..(346): n equals a,t,g, or c
  misc_feature (354)..(354): n equals a,t,g, or c
  misc_feature (356)..(356): n equals a,t,g, or c
  misc_feature (360)..(361): n equals a,t,g, or c
  misc_feature (364)..(365): n equals a,t,g, or c
  misc_feature (375)..(375): n equals a,t,g, or c
  misc_feature (381)..(381): n equals a,t,g, or c
  misc_feature (383)..(384): n equals a,t,g, or c
  misc_feature (386)..(386): n equals a,t,g, or c
  misc_feature (398)..(398): n equals a,t,g, or c
  misc_feature (405)..(405): n equals a,t,g, or c
  misc_feature (410)..(410): n equals a,t,g, or c
  misc_feature (418)..(418): n equals a,t,g, or c
  misc_feature (428)..(428): n equals a,t,g, or c
  misc_feature (440)..(440): n equals a,t,g, or c
  misc_feature (471)..(471): n equals a,t,g, or c
  misc_feature (491)..(491): n equals a,t,g, or c
  misc_feature (514)..(514): n equals a,t,g, or c
  misc_feature (516)..(516): n equals a,t,g, or c
  misc_feature (520)..(520): n equals a,t,g, or c
  misc_feature (524)..(524): n equals a,t,g, or c
  misc_feature (550)..(550): n equals a,t,g, or c
  misc_feature (556)..(556): n equals a,t,g, or c
  misc_feature (574)..(574): n equals a,t,g, or c
  misc_feature (597)..(597): n equals a,t,g, or c
  misc_feature (623)..(623): n equals a,t,g, or c
  misc_feature (634)..(634): n equals a,t,g, or c
  misc_feature (656)..(656): n equals a,t,g, or c
  misc_feature (663)..(663): n equals a,t,g, or c
  misc_feature (681)..(681): n equals a,t,g, or c
  misc_feature (709)..(709): n equals a,t,g, or c
  misc_feature (728)..(728): n equals a,t,g, or c
  misc_feature (742)..(742): n equals a,t,g, or c
ggctggacaaactgacagtcacctcccagaacctgcagctggagaacctgcgcatgaagcttcccaagcctcccaagccaccaagtatggcaacatgacagaggaccatgtgatgcacctgctccagaatgctgaccccctgaaggtgtacccgccactgaaggggagcttcccggagaacctgagacaccttaagaacaccatggagaccatagactggaaggtctttgagagctggatgcaccattggctcctgnttgaaatgancangcacttcttngancaaaannccantnnngnttcancnnaaganncactngaactgganganccggcttttgggctnggtgggancnaacnnganntgggcccaanccccangnnanaacaacaaaagnggtcttnaacantctggcangcccacacangttccggtttcntggttcctttaggccccaagcccttccccanttttccaacctggaccttantccatgagaaccttggggctggntntttngganccttggaccagaacaaccaagtcggnacaacngattacatgcaacaaggncctggtggccaatttcatttgtnacaagggccttgaggtcccaagaagnggccaaaactngacagatcccggttcttgaatnacagaancttcaaacaaggttcaanactaagttatggccaaatgggaaggccngggagaaaggataaccttnccccaaccccaagnttggaatg

SEQ ID NO: 1946 - DNA, 704 bp, Homo sapiens
  misc_feature (5)..(6): n equals a,t,g, or c
  misc_feature (371)..(371): n equals a,t,g, or c
  misc_feature (475)..(475): n equals a,t,g, or c
  misc_feature (537)..(537): n equals a,t,g, or c
  misc_feature (571)..(571): n equals a,t,g, or c
  misc_feature (575)..(575): n equals a,t,g, or c
  misc_feature (580)..(580): n equals a,t,g, or c
  misc_feature (602)..(602): n equals a,t,g, or c
  misc_feature (643)..(643): n equals a,t,g, or c
  misc_feature (649)..(649): n equals a,t,g, or c
  misc_feature (658)..(658): n equals a,t,g, or c
  misc_feature (674)..(674): n equals a,t,g, or c
  misc_feature (683)..(683): n equals a,t,g, or c
ggctnnaggtacccaccgggggatgtgcctgctcaggaaacctctttgctccacacagcatggggcttcagctgctggcccaaggccaggagcgctgggttctgcagcagggctcagcctcaggggcgttaagaccctggatgacatcaataaagggacaggaagggccatgttgccacatgagcaagcttgggtgctcccaaggttcaaatactttttattagacacggccaggcagagaagaccatgggagttcccgaggggccccagctttcaagggcgacgggagagacacaggataaaaggttaaaaagtgcagaggcagagtctggggctcaggttgggtctaaggtgtcctcaaacaggctgangaggttccgaaggctcaaaggaaggggaaggagccccgaaggaaggctcttgagttgatgtcacttaaggtccaggggcatcccttgggaaggagaagaagtantggacacttcaggaatccaaaaagcttagccctggcccaccccaagccccctgggacctggnttaacctggggtggtgcaaccctgggttcccggngggnttggnaaggtgctttccccaaaagttnccggggcccaaggaacaagcctttaagggggaaaaaattgnaaaggnccttgcaangaaagggccaaggccnaagaacaanggaagggttggtcccaagggc

SEQ ID NO: 1947 - DNA, 638 bp, Homo sapiens
  misc_feature (317)..(317): n equals a,t,g, or c
  misc_feature (439)..(439): n equals a,t,g, or c
  misc_feature (473)..(473): n equals a,t,g, or c
  misc_feature (476)..(476): n equals a,t,g, or c
  misc_feature (513)..(514): n equals a,t,g, or c
  misc_feature (517)..(517): n equals a,t,g, or c
  misc_feature (526)..(526): n equals a,t,g, or c
  misc_feature (530)..(530): n equals a,t,g, or c
  misc_feature (557)..(557): n equals a,t,g, or c
  misc_feature (602)..(603): n equals a,t,g, or c
  misc_feature (629)..(629): n equals a,t,g, or c
  misc_feature (638)..(638): n equals a,t,g, or c
gtttagcttctgcgtgtttcccatggggatagctaggcccctgatcgtgataaggattaaaagggcccctaggcttatactgttttattgtatgtgttactcttggctgatgtcgtagagaaatgagtcaggcctataaggctaaattttttaagacatgctttgacaagtattaaatacaattcaaatggaacttgattgttttcattagcaaactcataattatccttttccttaacacttccagttgagaaaacaagtatttgttaatgaccagtaataatcttgatccagggtaggcaaaatttttcttcagngccagattgatactttaggctttgcaggccacggggactcttggcaaccccaactctgctggttgtagcacaaaaagcagccacaggcaccaagtaaaccacatgggctggggcctcttganccaataaaacttttatttaccggaaaccccaggnaanatgactggctgggcccctgggccttggcagcattttnnggnggtgaacanaagnaactggtcaagatcatacatttaccgncattaccaaaatagaatcttcccggtagttgactggttgatgaannaacattggtaaggtaataaccatatnttccaatgn

SEQ ID NO: 1948 - DNA, 744 bp, Homo sapiens
  misc_feature (293)..(293): n equals a,t,g, or c
  misc_feature (519)..(519): n equals a,t,g, or c
  misc_feature (549)..(549): n equals a,t,g, or c
  misc_feature (563)..(563): n equals a,t,g, or c
  misc_feature (590)..(590): n equals a,t,g, or c
  misc_feature (607)..(607): n equals a,t,g, or c
  misc_feature (620)..(620): n equals a,t,g, or c
  misc_feature (639)..(639): n equals a,t,g, or c
  misc_feature (648)..(648): n equals a,t,g, or c
  misc_feature (674)..(674): n equals a,t,g, or c
  misc_feature (692)..(692): n equals a,t,g, or c
  misc_feature (729)..(729): n equals a,t,g, or c
ggcggtgcgtggtctacgccgagtgacagagacgctcaggctgtgttctcaggatgaccgagtgggagacagcagcaccagcggtggcagagaccccagacatcaagctctttgggaagtggagcaccgatgatgtgcagatcaatgacatttccctgcaggattacattgcagtgaaggagaagtatgccaagtacctgcctcacagtgcagggcggtatgccgccaaacgcttccgcaaagctcagtgtcccattgtggagcgcctcactaactccatgatgatgcacggncgcaacaacggcaagaagctcatgactgtgcgcatcgtcaagcatgccttcgagatcatacacctgctcacaggcgagaacccttttgcaggtcctggtgaacgccatcatcaacagtggtccccgggaggacttcacacgcattgggcgcgccgggacttgtgaagacgacaggcttgtggatgtgtccccccttgcgccgtgtgaaccaggccatctgggcttnttgtgcacaaggcgcttcgtgaaggcttgnctttccggaaacanttaagaaccaattggttgaatggcctnggcaaaaatgaagcttnatcaaaggcttgnccaaaggggctttctttgnaacttcctnaaggccattttaagaaagaaaagganccaaactttggaaaccgngtggggcccaaagttccaaaaccggttgaaatttttncccaaatttggttgg

SEQ ID NO: 1949 - DNA, 712 bp, Homo sapiens
  misc_feature (70)..(70): n equals a,t,g, or c
  misc_feature (457)..(457): n equals a,t,g, or c
  misc_feature (500)..(500): n equals a,t,g, or c
  misc_feature (504)..(504): n equals a,t,g, or c
  misc_feature (551)..(553): n equals a,t,g, or c
  misc_feature (562)..(562): n equals a,t,g, or c
  misc_feature (580)..(580): n equals a,t,g, or c
  misc_feature (619)..(619): n equals a,t,g, or c
  misc_feature (636)..(636): n equals a,t,g, or c
  misc_feature (655)..(655): n equals a,t,g, or c
  misc_feature (665)..(665): n equals a,t,g, or c
  misc_feature (707)..(707): n equals a,t,g, or c
atacgccctttggtaccggtccggaattcccgggtcgacccacgcgtccggtttttgtgaagtcagaganagatgctggaaagatcattgtatggacaagcataatggaacagacaggtttgtgaaccagcagtttcaagaggaaaagttaaataaattgcagaagttacttattcttttaagaggtctgcctggttctgggaaaacaacattgtctcgaattctgcttggtcagaatcgtgatggcattgtgttcagcactgatgactattttcaccatcaagatgggtacaggtataatgttaatcaacttggtgatgcccatgactggaaccagaacagaggttttgttttgggctaagtgtcccaaggatagaatatttggctaggagtcaaaaagacctaaaatttaattttcagcttaaggttttaccagctgaatggactgtaggcaagnccgtttaaatagctttgaggacctaaattctccatctggttanaagngggggataattatcttgccctactggatcagggttttgggaaaagcnnnagaatttanataaacctttttaaactnggaaatagttaatcagtataagctggtaaaataataccncatgggatatttaagangctttattttaaacttganggtaaattcngagaactttgaactggccattggtatgagcccaaggtttttncccgg

SEQ ID NO: 1950 - DNA, 699 bp, Homo sapiens
  misc_feature (412)..(412): n equals a,t,g, or c
  misc_feature (471)..(471): n equals a,t,g, or c
  misc_feature (550)..(550): n equals a,t,g, or c
  misc_feature (559)..(559): n equals a,t,g, or c
  misc_feature (570)..(570): n equals a,t,g, or c
  misc_feature (587)..(587): n equals a,t,g, or c
  misc_feature (589)..(589): n equals a,t,g, or c
  misc_feature (599)..(599): n equals a,t,g, or c
  misc_feature (605)..(605): n equals a,t,g, or c
  misc_feature (631)..(631): n equals a,t,g, or c
  misc_feature (683)..(683): n equals a,t,g, or c
  misc_feature (688)..(688): n equals a,t,g, or c
  misc_feature (691)..(691): n equals a,t,g, or c
gcccacgcgtccgacgagtctgaggcggagggagtaatggcaggacaagcgtttagaaagtttcttccactctttgaccgagtattggttgaaaggagtgctgctgaaactgtaaccaaaggaggcattatgcttccagaaaaatctcaaggaaaagtattgcaagcaacagtagtcgctgttggatcgggttctaaaggaaagggtggagagattcaaccagttagcgtgaaagttggagataaagttcttctcccagaatatggaggcaccaaagtagttctagatgacaaggattatttcctatttagagatggtgacattcttggaaagtacgtagactgaaataagtcactattgaaatggcatcaacatgatgctgcccattccactgaagttctgaaatctttcncatggaaaataattccataattctcttttataataaactaatgataactaatggacatncaatggcttccaaattggttccttggactgatataaacactttccaataaaaatatgtaaatgaaaaaaaaaaaaaaanggcggccgntctagaggaanccaagcttacgtacgcngnatccaaggcnaaactnttctatagggccctaaattcaattcnctggccgcgtttacacgcgggctggaaacctgcgtaccactaacgctgaganatccnttncattgcga

SEQ ID NO: 1951 - DNA, 592 bp, Homo sapiens
  misc_feature (9)..(9): n equals a,t,g, or c
  misc_feature (17)..(17): n equals a,t,g, or c
  misc_feature (46)..(46): n equals a,t,g, or c
  misc_feature (50)..(50): n equals a,t,g, or c
  misc_feature (68)..(68): n equals a,t,g, or c
  misc_feature (155)..(155): n equals a,t,g, or c
  misc_feature (157)..(157): n equals a,t,g, or c
  misc_feature (407)..(407): n equals a,t,g, or c
  misc_feature (418)..(418): n equals a,t,g, or c
  misc_feature (429)..(429): n equals a,t,g, or c
  misc_feature (444)..(444): n equals a,t,g, or c
  misc_feature (448)..(448): n equals a,t,g, or c
  misc_feature (476)..(476): n equals a,t,g, or c
  misc_feature (530)..(530): n equals a,t,g, or c
  misc_feature (532)..(532): n equals a,t,g, or c
  misc_feature (543)..(543): n equals a,t,g, or c
  misc_feature (585)..(585): n equals a,t,g, or c
  misc_feature (589)..(589): n equals a,t,g, or c
taagggcancccacccntccggaattcccgggtcgacccacgcgtncggncgctccagctgtttttgnttgactccacagataccccgaagccatggcaagcaagggcttgcaggacctgaagcaacaggtggaggggaccgcccaggaagccgngncagcggccggagcggcagctcagcaagtggtggaccaggccacagaggcggggcagaaagccatggaccagctggccaagaccacccaggaaaccatcgacaagactgctaaccaggcctctgacaccttctctgggattgggaaaaaattcggcctcctgaaatgacagcagggagacttgggtcggcctcctgaaatgacagcagggagacttgggtgaccccccttccaggcgccatctagcacagnctggccctganctccgggcagncaccacctcctcggnctgncccctcattaaaattcacgttcccaaanaaaaaaaaaaaaaaaaaagggcggacggtctagaggatccaagcttacggacgngngcatgcgacgncataagctcttctataggggcacctaaattcaattcactggncggngtt

SEQ ID NO: 1952 - DNA, 670 bp, Homo sapiens
  misc_feature (605)..(605): n equals a,t,g, or c
  misc_feature (610)..(610): n equals a,t,g, or c
  misc_feature (615)..(617): n equals a,t,g, or c
gggtgaacatggacgctgcagtgcagcagcagatgctgaagctgatgagtgtgcggctgtgcccgccggtgccaggacaggccctgctggacctggtggtcagcccgcccgcgcccaccgacccctcctttgcgcagttccaggctgagaagcaggcagtgctggcagagctggcggccaaggccaagctcaccgagcaggtcttcaatgaggctcctggcatcagctgcaacccagtgcagggcgccatgtactccttcccgcgcgtgcagctgcccccgcgggcggtggagcgcgctcaggagctgggcctggcccccgatatgttcttctgcctgcgcctcctggaggagaccggcatctgcgtggtgccagggagcggctttgggcagcgggaaggcacctaccacttccggatgaccattctgccccccttggagaaactgcggctgctgctggagaagctgagcaggttccatgccaagttcaccctcgagtactcctgagcaccccagctgggaccaggctgggtcgccctggactgtgtgctcaggagccctgggaggctctggagcccactgtacttgctcttgatgcctggcggngtggngtggnnnggggtgctgggcccctgcctcttttgcaggtcccttaataaagctgtgtggca

SEQ ID NO: 1953 - DNA, 751 bp, Homo sapiens
  misc_feature (591)..(591): n equals a,t,g, or c
ggcgctggtaggccttggagaggcgggttaggaagagtggagactgctgcacggactctggaaccatgaacatatttgatcgaaagatcaactttgatgcgcttttaaaattttctcatataaccccgtcaacgcagcagcacctgaagaaggtctatgcaagttttgccctttgtatgtttgtggcggctgcaggggcctatgtccatatggtcactcatttcattcaggctggcctgctgtctgccttgggctccctgatattgatgatttggctgatggcaacacctcatagccatgaaactgaacagaaaagactgggacttcttgctggatttgcattccttacaggagttggcctgggccctgccctggagttttgtattgctgtcaaccccagcatccttcccactgctttcatgggcacggcaatgatctttacctgcttcaccctcagtgcactctatgccaggcgccgtagctacctctttctgggaggtatcttgatgtcaagccctgagcttggtgcttttgcttccctggggaatggtttctttggatccatttggcttttccaggcaaacctgtatntgggactggtggtcatgtgtggcttcgcctttttgatactcaactcattattgaaaaggccgaacatggagatcaagattatatctggcactgcattgatctctcttaagattcattactggcttcagaaaactcatgatgaacctggccatgaatgaaa

SEQ ID NO: 1954 - DNA, 767 bp, Homo sapiens
  misc_feature (24)..(24): n equals a,t,g, or c
  misc_feature (35)..(35): n equals a,t,g, or c
  misc_feature (72)..(72): n equals a,t,g, or c
  misc_feature (125)..(125): n equals a,t,g, or c
  misc_feature (176)..(176): n equals a,t,g, or c
  misc_feature (182)..(182): n equals a,t,g, or c
  misc_feature (219)..(219): n equals a,t,g, or c
  misc_feature (242)..(242): n equals a,t,g, or c
  misc_feature (271)..(271): n equals a,t,g, or c
  misc_feature (307)..(307): n equals a,t,g, or c
  misc_feature (380)..(380): n equals a,t,g, or c
  misc_feature (404)..(404): n equals a,t,g, or c
  misc_feature (420)..(420): n equals a,t,g, or c
  misc_feature (457)..(457): n equals a,t,g, or c
  misc_feature (510)..(510): n equals a,t,g, or c
  misc_feature (586)..(586): n equals a,t,g, or c
  misc_feature (646)..(646): n equals a,t,g, or c
  misc_feature (660)..(660): n equals a,t,g, or c
  misc_feature (685)..(685): n equals a,t,g, or c
  misc_feature (711)..(711): n equals a,t,g, or c
  misc_feature (735)..(735): n equals a,t,g, or c
  misc_feature (737)..(737): n equals a,t,g, or c
  misc_feature (740)..(740): n equals a,t,g, or c
tcgctggtatctctgcaggtaccnggccggaattnccgggtcgacccacgcgtgcgggaagatcacttggcngtgaagcatttttcagttgaaggacagttggaattcagagcccttctatttgncccacgacgtgctccttttgatctgtttgaaaacagaaagaaaaagaacantatcanattgtatgtacgcagagttttcatcatggataactgngaggagctaatccctgaatatcngaacttcattagaggggtggtagactcgnaggatctccctctaaacatatcccgtgagatgttgnaacaaagcaaaattttgaaagttatcaggaagaatttggtcaaaaaatgcttagaactctttactgaactggnggaagataaagagaactacaaganattctatgagcagttntctaaaaacataaagcttggaatacacgaagactctnaaaatcggaagaagctttcagagctgttaaggtactacacatctgcctctggngatgagatggtttctctcaaggactactgcaccagaatgaaggagaaccagaaacatatctattatatcacaggtnagaccaaggaccaggtagctaactcagcctttgtggaacgtcttcggaaacatggcttanaagtgatctatatnattgagcccattgatgaagtactgngtccaacagctgaaggaatttgaggngaagactttagtggcagtcaccananaangcctggaactttcagaaggatgaagaa

SEQ ID NO: 1955 - DNA, 783 bp, Homo sapiens
  misc_feature (220)..(220): n equals a,t,g, or c
  misc_feature (529)..(529): n equals a,t,g, or c
  misc_feature (597)..(597): n equals a,t,g, or c
  misc_feature (625)..(625): n equals a,t,g, or c
  misc_feature (639)..(639): n equals a,t,g, or c
  misc_feature (645)..(645): n equals a,t,g, or c
  misc_feature (766)..(766): n equals a,t,g, or c
  misc_feature (769)..(769): n equals a,t,g, or c
  misc_feature (772)..(772): n equals a,t,g, or c
gtttatcacctgaccgatgaagactttgaccagtttgtgaaggaacactcctctgtcctcgtcatgttccacgccccatggtgtggccactgtaagaaaatgaagccggagtttgagaaggcagcagaagccctccatggagaagcagatagctctggtgtccttgcagctgtcgatgccactgtcaacaaggccctggcagaaagattccacatctcanagtttcctacgttgaagtattttaagaatggagagaaatacgcagtgcctgtgctcaggacaaagaagaagtttctcgagtggatgcaaaaccctgaggcccccccgcccccagagcccacgtgggaagagcagcagacaagcgtgttgcacctggtgggggacaacttccgggagaccctgaagaagaagaaacacaccttggtcatgttctacgccccttggtgcccacactgtaagaaggtcattccgcactttactgctactgctgatgccttcaaagatgaccgaaagattgcctgtgccgctnttgactgcgtcaaagacaagaaccaagacctgtgccagcaggaggcggtcaagggctaccccactttncactactaccactatgggaagttcgcanaaaagtatgacagngaccgnacagaaatgggatttaccaattatattcgagccctccggagggagaccatgaaagactagggaaaaaggaaggaagagttataattcctggcttaaaaaaaagcttttccattacctgggnaanganaccctggtttg

SEQ ID NO: 1956 - DNA, 674 bp, Homo sapiens
  misc_feature (193)..(193): n equals a,t,g, or c
  misc_feature (272)..(272): n equals a,t,g, or c
  misc_feature (325)..(325): n equals a,t,g, or c
  misc_feature (345)..(345): n equals a,t,g, or c
  misc_feature (370)..(370): n equals a,t,g, or c
  misc_feature (457)..(457): n equals a,t,g, or c
  misc_feature (483)..(483): n equals a,t,g, or c
  misc_feature (617)..(617): n equals a,t,g, or c
  misc_feature (634)..(634): n equals a,t,g, or c
  misc_feature (652)..(652): n equals a,t,g, or c
  misc_feature (664)..(664): n equals a,t,g, or c
  misc_feature (672)..(672): n equals a,t,g, or c
gcccacgcgtccggttttccttctctccgtgcaacgctggcaagtctcaaagtcgccacagatactgaagtactctttcccagtgggactaagaaccagcagaacagatatactttctctcaagatgtctctccagcaaaacttttccccatgtccaaggccttggctttcctcatcatttccagcgtatatnagcaagacacagtgctatcatacatccccctgcagctttaaaaagcagcagaagcaagcacttctagccagaccctcangcaccatcacttacctaactgacagcccaaagccagcattatgtgtaactctngcaggactaatccccttcgntgctccaccactggtcatgctgatnacaaaaacttatattcccatattagcttttactcatatggcttatggagccagtttcctatctttcttgggtgggatcagatgcggntttgctctaccagaaggtagtccagnccaaccagactaccttaatttagctagcagtgcagctcctcttttcttttcatggtttgccttccttatttctgaaagacttaagtgaagccatagtcacagtaataatgggtaatgggaggagcattccaccntgaactttttctcttancacattatcccaactggnttaaaggccctnaggatagnaa

SEQ ID NO: 1957 - DNA, 652 bp, Homo sapiens
  misc_feature (587)..(587): n equals a,t,g, or c
gatcgagctgcagtcccagctcagcatgaaagctgggctggagaactcactggccgagacagagtgccgctatgccacgcagctgcagcagatccaggggctcattggtggcctggaggcccagctgagtgagctccgatgcgagatggaggctcagaaccaggagtacaagatgctgcttgacataaagacacggctggagcaggagatcgctacttaccgcagcctgctcgagggccaggatgccaagatggctggcattggcatcagggaagcctcttcaggaggtggtggtagcagcagcaatttccacatcaatgtagaagagtcagtggatggacaggtggtttcttcccacaagagagaaatctaagtgtctattgcaggagaaacgtcccttgccactccccactctcatcaggccaagtggaggactggccagagggcctgcacatgcaaactccagtccctgccttcagagagctgaaaagggtccctcggtcttttatttcagggctttgcatgcgctctattccccctctgcctctccccaccttctttggagcaaggagatgcagctgtattgngtaacaagctcatttgtacagtgtctggtcatgtaataaagaattacttttccttttgcaaatat

SEQ ID NO: 1958 - DNA, 227 bp, Homo sapiens
  misc_feature (216)..(217): n equals a,t,g, or c
  misc_feature (221)..(221): n equals a,t,g, or c
  misc_feature (224)..(225): n equals a,t,g, or c
gccacgccaccgtgcctggctggacatgtaaatttgaagtgaatggttaaacatccagctagctgaaagcatggcagaccctaacagaaaagctacagtgtgtttttgcagctatgaagtgaatggtttcctggggaaaattgtgactttgtataactgttgttgaaaccagaataaattatatttcacttgcaaaaaaaaaaaaaaaaaaaaaannaaanaannga

SEQ ID NO: 1959 - DNA, 441 bp, Homo sapiens
  misc_feature (344)..(344): n equals a,t,g, or c
  misc_feature (386)..(386): n equals a,t,g, or c
  misc_feature (437)..(437): n equals a,t,g, or c
  misc_feature (439)..(439): n equals a,t,g, or c
  misc_feature (441)..(441): n equals a,t,g, or c
ctaacccctataccttctgcataatgaattaactagaaataactttgcaaggagagccaaagctaagacccccgaaaccagacgagctacctaagaacagctaaaagagcacacccgtctatgtagcaaaatagtgggaagatttataggtagaggcgacaaacctaccgagcctggtgatagctggttgtccaagatagaatcttagttcaactttaaatttggcccacagaaccctctaaatccccttgtaaatttaactgttagtccaaagaggaacagctctttggacactaggaaaaaaccttgtagagagagtaaaaaatttaacacccatagtaggnctaaaagcagccaccaattaagaaagcgttcaagctcaacanccactacctaaaaaatcccaaacatataactggactcctcacacccaattngncn

SEQ ID NO: 1960 - DNA, 241 bp, Homo sapiens
  misc_feature (20)..(20): n equals a,t,g, or c
  misc_feature (67)..(67): n equals a,t,g, or c
  misc_feature (95)..(95): n equals a,t,g, or c
  misc_feature (110)..(110): n equals a,t,g, or c
  misc_feature (136)..(136): n equals a,t,g, or c
  misc_feature (175)..(175): n equals a,t,g, or c
  misc_feature (182)..(182): n equals a,t,g, or c
  misc_feature (200)..(200): n equals a,t,g, or c
  misc_feature (214)..(214): n equals a,t,g, or c
  misc_feature (226)..(226): n equals a,t,g, or c
gcttttctcttggcggccgnaggaagaatcccctggtctccgtgagcgtccattttgtggaacctgngttgcaagcagggaggggcaaatacaantgccctgttcccgantctctagatggccgatctagagaagncccgtctcataagtggaaggatgaaattctcagaacagntaacctntaatgggagttaggtttntgattctcattcanaattatcacggnatttacttgcagcgt

SEQ ID NO: 1961 - DNA, 366 bp, Homo sapiens
  misc_feature (160)..(160): n equals a,t,g, or c
  misc_feature (203)..(203): n equals a,t,g, or c
  misc_feature (249)..(249): n equals a,t,g, or c
  misc_feature (255)..(255): n equals a,t,g, or c
  misc_feature (266)..(266): n equals a,t,g, or c
  misc_feature (296)..(296): n equals a,t,g, or c
  misc_feature (350)..(350): n equals a,t,g, or c
  misc_feature (353)..(354): n equals a,t,g, or c
  misc_feature (361)..(361): n equals a,t,g, or c
agtgagccaagatgccgccactgcactccagccggggcaacagtgcaagactgtatctcaaaaaaaaaagaaagaaagaaagaaagaaagaaagaaagaaagaaagaaagaaaaaaaccgactaaaatgggccaggtgtgacccattgtcctggcttgtnttgggtaactgggactataggtgtaaccactatagagaggaanttcacaggtctacagtccccattccaaataatactaaactctacangctcangcctgtgttcnagcactttgggaggccaaggcaggcggatnacttgaggccaggagttcaagaccagctggccaaaatgatgagcttcgtctctnttnnaaatccnaaatt

SEQ ID NO: 1962 - DNA, 695 bp, Homo sapiens
  misc_feature (5)..(5): n equals a,t,g, or c
  misc_feature (9)..(9): n equals a,t,g, or c
  misc_feature (39)..(39): n equals a,t,g, or c
  misc_feature (43)..(43): n equals a,t,g, or c
  misc_feature (121)..(121): n equals a,t,g, or c
  misc_feature (133)..(134): n equals a,t,g, or c
  misc_feature (525)..(525): n equals a,t,g, or c
  misc_feature (560)..(560): n equals a,t,g, or c
  misc_feature (583)..(583): n equals a,t,g, or c
  misc_feature (588)..(588): n equals a,t,g, or c
  misc_feature (643)..(643): n equals a,t,g, or c
  misc_feature (645)..(645): n equals a,t,g, or c
  misc_feature (667)..(667): n equals a,t,g, or c
  misc_feature (684)..(684): n equals a,t,g, or c
  misc_feature (691)..(691): n equals a,t,g, or c
ccttntctnttgggaaaaatcctgggaaaactgtcccgnactnggtccggaattcccgggtcgacccacgcgtccggcgggtctgtctcttttttcaacagtgtttggacggaacagatcnggggactctctnncagcctccgaccgccctccgatttcctctccgcttgcaacctccgggaccatcttctcggccatctcctgcttctgggacctgccagcaccgtttttgtggttagctccttcttgccaaccaaccatgagctcccagattcgtcagaattattccaccgacgtggaggcagccgtcaacagcctggtcaatttgtacctgcaggcctcctacacctacctctctctgggcttctatttcgaccgcgatgatgtggctctggaaggcgtgaagccacttcttccgcgaattggccgaggagaagcgcgagggctacgaagcgtttctgaagatgcaaaaccagcgtggcggcgtctagaggatccaagcttacgtacgcgtgcatgcgacgncataagctcttctatagtgcacctaaattcaattnatgggccgtcgtttacaacgtcngtgantgggaaaaaccctggcggtacccaacttaatcggcttgcagacaatccccctttngncaagttggcgtaataaccgaanaggcccggaaccgaatnggccttnccaa

SEQ ID NO: 1963 - DNA, 309 bp, Homo sapiens
  misc_feature (257)..(257): n equals a,t,g, or c
  misc_feature (270)..(270): n equals a,t,g, or c
  misc_feature (282)..(282): n equals a,t,g, or c
  misc_feature (292)..(292): n equals a,t,g, or c
  misc_feature (309)..(309): n equals a,t,g, or c
caacaaccgactaatcaccacccaacaatgactaatcaaactaacctcaaaacaaatgataaccatacacaacactaaaggacgaacctgatctcttatactagtatccttaatcatttttaattgccacaactaacctcctcggactcctgcctcactcatttacaccaaccacccaactatctataaacctagccatggccatccccttatgagcgggcgcagtgattataggctttcgttctaagattaaaatngccctagcccaanttcttaccacanggcacacttnaaccccttatccccttn

SEQ ID NO: 1964 - DNA, 440 bp, Homo sapiens
catactgtaaggtgtattaattccatttcacgctgctgtgaagaaatacctgagactgggtaatttataaaggaaagagatttaattgactcacagttccacagggctgagggggcctcaggaaacttacaatcatggcagaaggggaagtaaatatgtccttcttcacatggtggcaggaaggagaagtgctgaacaaaaggaggaaagccccttgtagaagcatcagatcttgtgagaactcactcactatcacgagaacagtatggaggtcaccgcccccatgattcaattacctcctaccaggttcctccttgctaggattatgaggactatgggaactaccattcaagatgagatttgggtgaggacacagccaaaccatatcaaaaggcagttgcctaagatgatgtgaaatcaccagtgattaagacttgatc

SEQ ID NO: 1965 - DNA, 443 bp, Homo sapiens
  misc_feature (11)..(11): n equals a,t,g, or c
  misc_feature (176)..(176): n equals a,t,g, or c
  misc_feature (420)..(420): n equals a,t,g, or c
  misc_feature (431)..(431): n equals a,t,g, or c
taccatctcanttctaggaatactagtatatcgctcacacctcatatcctccctactatgcctagaaggaataatactatcgctgttcattatagctactctcataaccctcaacacccactccctcttagccaatattgtgcctattgccatactagtctttgccgcctgcgaanagcggtgggcctagccctactagtctcaatctccaacacatatggcctagactacgtacataacctaaacctactccaatgctaaaactaatcgtcccaacaattatattactaccactgacatgactttccaaaaaaacacataatttgaatcaacacaaccacccacagcctaattattagcatcatccctctactattttttaacccaaatcaacaaccaacctatttagctgttccccancttttctccgnacccctaacaac

SEQ ID NO: 1966 - DNA, 511 bp, Homo sapiens
  misc_feature (448)..(448): n equals a,t,g, or c
  misc_feature (451)..(451): n equals a,t,g, or c
  misc_feature (485)..(485): n equals a,t,g, or c
  misc_feature (506)..(506): n equals a,t,g, or c
  misc_feature (511)..(511): n equals a,t,g, or c
agcctttctattagctcttagtaagattacacatgcaagcatccccgttccagtgagttcaccctctaaatcaccacgatcaaaagggacaagcatcaagcacgcagcaatgcagctcaaaacgcttagcctagccacacccccacgggaaacagcagtgattaacctttagcaataaacgaaagtttaactaagctatactaaccccagggttggtcaatttcgtgccagccaccgcggtcacacgattaacccaagtcaatagaagccggcgtaaagagtgttttagatcaccccctccccaataaagctaaaactcacctgagttgtaaaaaactccagttgacacaaaatagactacgaaagtggctttaacatatctgaacacacaatagctaaaaaaaaaaaaaaaaaactcgggggggggcccggtacccattcgccctanagnggggcgtattaaaattcactggccgtggttttanaaagtcgggaatgggaacggnaaaan

SEQ ID NO: 1967 - DNA, 162 bp, Homo sapiens
  misc_feature (5)..(5): n equals a,t,g, or c
  misc_feature (7)..(7): n equals a,t,g, or c
  misc_feature (15)..(15): n equals a,t,g, or c
  misc_feature (17)..(17): n equals a,t,g, or c
  misc_feature (71)..(71): n equals a,t,g, or c
  misc_feature (132)..(132): n equals a,t,g, or c
  misc_feature (140)..(140): n equals a,t,g, or c
  misc_feature (156)..(156): n equals a,t,g, or c
  misc_feature (159)..(159): n equals a,t,g, or c
actcntnaccgacgnancacggaccgctctagaaactagtggaatcccccgggctgcaggaattcggcacnagggggtatcaccctgaaagagttgtgtcttttgtggccagtgacaaatccaggaaatgantgttgctnatagggataaatcttnagnctg

SEQ ID NO: 1968 - DNA, 180 bp, Homo sapiens
gtcctaatagtagaagaaccctccataaacctggagtgactatatggatgccccccaccctaccacacattcgaagaacccgtatacataaaatctagacaaaaaaggaaggaatcgaaccccccaaagctggtttcaagccaaccccatggcctccatgactttttcaaaaaaaaaaaa

SEQ ID NO: 1969 - DNA, 292 bp, Homo sapiens
  misc_feature (172)..(172): n equals a,t,g, or c
  misc_feature (238)..(238): n equals a,t,g, or c
  misc_feature (255)..(255): n equals a,t,g, or c
  misc_feature (262)..(262): n equals a,t,g, or c
  misc_feature (279)..(279): n equals a,t,g, or c
  misc_feature (290)..(290): n equals a,t,g, or c
gcccagctaatttttgtattttcagtagaaacgggatttcaccacgttggccaggctggtctcgaactcctgaccgcaagtgatccacccgcctccgcctcccaaagtgctgggattacaggcgtgagccaccgtgcccggcccaaaggggaaactcttgtgggaagaccanaagggctcacatctcccctctgattcccccatgcacattgccttatctctccccatctacccggantctatgtgtttttcctnctgccantttactataattgtttnttttccgcttnca

SEQ ID NO: 1970 - DNA, 610 bp, Homo sapiens
  misc_feature (439)..(439): n equals a,t,g, or c
  misc_feature (469)..(469): n equals a,t,g, or c
  misc_feature (499)..(499): n equals a,t,g, or c
  misc_feature (546)..(546): n equals a,t,g, or c
  misc_feature (558)..(558): n equals a,t,g, or c
  misc_feature (580)..(580): n equals a,t,g, or c
  misc_feature (606)..(606): n equals a,t,g, or c
  misc_feature (610)..(610): n equals a,t,g, or c
gccagtaagtgctcctccggccacgccaaccccagtcccggcggcggccccagcctcagttccagcgccaacgccagcaccggctgcggctccggttcccgctgcggctccagcctcatcctcagaccctgcggcagcagcggctgcaactgcggctcctggccagaccccggcctcagcgcaagctccagcgcagaccccagcgcccgctctgcctggtcctgctcttccagggcccttccccggcggccgcgtggtcaggctgcacccagtcattttggcctcattgtggacagctacgagagacgcaacgagggtgctgcccgagttatcgggaccctgttgggaactgcgacaaacactcaagtggaggtcaccaattgcttttcagtgccgacaatgagtcagaaagatgaagtggctggtgacatggaattgntaagaatatggatgaactggataaaaaagnttcttcaaatggacttaatcctgggctggnacctacgggccatgacatacaaaagcactttgggctgatccatgagnactaaagccganaggccccaacccatcaactaantggggcacaaagtttcaaaacggccnatgn

SEQ ID NO: 1971 - DNA, 198 bp, Homo sapiens
  misc_feature (164)..(164): n equals a,t,g, or c
aaatactaccgtatggcccaccataattacccccatactccttacactattcctcatcacccaactaaaaatattaaacacaaactaccacctacctccctcaccaaagcccataaaaataaaaattataacaaaccctgagaaccaaaatgaacaaaattctnttcgcttcattcattgcccccacaatcctagggg

SEQ ID NO: 1972 - DNA, 753 bp, Homo sapiens
  misc_feature (652)..(652): n equals a,t,g, or c
  misc_feature (713)..(713): n equals a,t,g, or c
  misc_feature (728)..(728): n equals a,t,g, or c
  misc_feature (736)..(736): n equals a,t,g, or c
gtaggtctacaagacgctacttcccctatcatagaagagcttatcacctttcatgatcacgccctcataatcattttccttatctgcttcctagtcctgtatgcccttttcctaacactcacaacaaaactaactaatactaacatctcagacgctcaggaaatggaaaccgtctgaactatcctgcccgccatcatcctagtcctcatcgccctcccatccctacgcatcctttacataacagacgaggtcaacgatccctcccttaccatcaaatcaattggccaccaatggtactgaacctacgagtacaccgactacggcggactaatcttcaactcctacatacttcccccattattcctagaaccaggcgacctgcgactccttgacgttgacaatcgagtagtactcccgattgaagcccccattcgtataataattacatcacaagacgtcttgcactcatgagctgtccccacattaggcttaaaaacagatgcaattcccggacgtctaaaccaaaccactttcaccgctacacgaccgggggtatactacggtcaatgctctgaaatctgtggagcaaaccacagtttcatgcccatcggcctagaattaattccctaaaaatctttgaaataagggccgnatttaccctatagcaccccctctacccctttagaggccaaaaaaaaaaaaaaaaaacttgnggggggggcccgggncccaattngcccctaaagggggggg

SEQ ID NO: 1973 - DNA, 770 bp, Homo sapiens
  misc_feature (670)..(670): n equals a,t,g, or c
  misc_feature (729)..(729): n equals a,t,g, or c
  misc_feature (740)..(740): n equals a,t,g, or c
ggccaactctcgcactctgttcttccgccgctccgccgtcgcgtttctctgccggtcgcaatggaagaagagatcgccgcgctggtcattgacaatggctccggcatgtgcaaagctggttttgctggggacgacgctccccgagccgtgtttccttccatcgtcgggcgccccagacaccagggcgtcatggtgggcatgggccagaaggactcctacgtgggcgacgaggcccagagcaagcgtggcatcctgaccctgaagtaccccattgagcatggcatcgtcaccaactgggacgacatggagaagatctggcaccacaccttctacaacgagctgcgcgtggccccggaggagcacccagtgctgctgaccgaggcccccctgaaccccaaggccaacagagagaagatgactcagattatgtttgagaccttcaacaccccggccatgtacgtggccatccaggccgtgctgtccctctacgcctctgggcgcaccactggcattgtcatggactctggagacggggtcacccacacggtgcccatctacgagggctacgccctcccccacgccatcctgcgtctggacctggctgccgggacctgaccgactacctcatgaagatccttactgagcgaggctacagcttcaccaccacggncgaagcgggaaatcgtgcgcgacatcaaggagaagcttggctacgtcgccctggacttngagccaggaanatggccaccggccgcatccttcctcttttt

SEQ ID NO: 1974 - DNA, 768 bp, Homo sapiens
  misc_feature (8)..(8): n equals a,t,g, or c
  misc_feature (588)..(596): n equals a,t,g, or c
  misc_feature (598)..(598): n equals a,t,g, or c
  misc_feature (600)..(600): n equals a,t,g, or c
  misc_feature (602)..(603): n equals a,t,g, or c
  misc_feature (627)..(627): n equals a,t,g, or c
  misc_feature (670)..(670): n equals a,t,g, or c
  misc_feature (675)..(675): n equals a,t,g, or c
  misc_feature (704)..(704): n equals a,t,g, or c
  misc_feature (720)..(720): n equals a,t,g, or c
  misc_feature (732)..(732): n equals a,t,g, or c
  misc_feature (746)..(746): n equals a,t,g, or c
  misc_feature (758)..(758): n equals a,t,g, or c
  misc_feature (765)..(765): n equals a,t,g, or c
ggatccgnagacgtaaggcccggcaagccaaggcgcgccgcatcgccccgcgccccgcgtcgggtcccatccggcccatcgtgcgctgccccacggttcggtaccacacgaaggtgcgcgccggccgcggcttcagcctggaggagctcagggtggccggcattcacaagaaggtggcccggaccatcggcatttctgtggatccgaggaggcggaacaagtccacggagtccctgcagaccaacgtgcagcggctgaaggagtaccgctccaaactcatcctcttccccaggaagccctcggcccccaagaagggagacagttctgctgaagaactgaaactggccacccagctgaccggaccggtcatgcccgtccggaacgtctataagaaggagaaagctcgagtcatcactgaggaagagaagaatttcaaagccttcgctagtctccgtatggcccgtgccaacgcccggctcttcggcatacgggcaaaaagagccaaggaagccgcagaacaggatgttgaaaagaaaaaataaagccctcctggggacttggaatcagtcggcagtcaaaaaaaaaaannnnnnnnnancntnnaaaaaaaaaaagggcggcccgttntagaggatcccttcgaggggcccaagcttacgcgtgcattgcnaacgncatagcttttttcccttatagggggtcgnattataagcttaggcncttgggccgcgnttttacaacgtcgnggaccttggaanatcttgntta

SEQ ID NO: 1975 - DNA, 611 bp, Homo sapiens
  misc_feature (470)..(470): n equals a,t,g, or c
  misc_feature (505)..(505): n equals a,t,g, or c
  misc_feature (524)..(524): n equals a,t,g, or c
  misc_feature (573)..(573): n equals a,t,g, or c
  misc_feature (577)..(577): n equals a,t,g, or c
  misc_feature (579)..(579): n equals a,t,g, or c
  misc_feature (590)..(590): n equals a,t,g, or c
gcccggtccgaccacctgaagacccacaccaggactcatacaggtgaaaagcccttcagctgtcggtggccaagttgtcagaaaaagtttgcccggtcagatgaattagtccgccatcacaacatgcatcagagaaacatgaccaaactccagctggcgctttgaggggtctccctcggggaccgttcagtgtcccaggcagcacagtgtgtgaactgctttcaagtctgactctccactcctcctcactaaaaaggaaacttcaagttgatcttcttcatccacttccaagacaagataccggtgcttctggaaactaccaggtgtgcctggaagagttggtctctgccctgcctacttttagttgactcacaggccctggagaagcagctaacaatgtctggtagttaaaagcccattgccatttggtctggattttctactgtaagaagagccataactgatcatgnccccctgacccttcccttctttttttaatgctcgntttcgcttggggatggaantattggaccattttctatcaagggaatatttataggccagggcatgggnatgngnctgctaaaggnaaactttggcaagggtttcca

SEQ ID NO: 1976 - DNA, 695 bp, Homo sapiens
  misc_feature (8)..(8): n equals a,t,g, or c
  misc_feature (543)..(543): n equals a,t,g, or c
  misc_feature (585)..(585): n equals a,t,g, or c
  misc_feature (609)..(609): n equals a,t,g, or c
  misc_feature (611)..(611): n equals a,t,g, or c
  misc_feature (675)..(676): n equals a,t,g, or c
  misc_feature (684)..(684): n equals a,t,g, or c
ggcgccgncggtggcagagagggggctaaagagcgtcgtgtggcagaagataaaagcaacagtgtttgatgactgcaagaaagaaggcgaatggaagataatgcttttagatgaatttaccactaagcttttggcatcgtgttgcaaaatgacagatcttctagaagaaggtattactgttgtagagaatatttataagaaccgtgaacctgtcagacaaatgaaagctctttatttcatcactccgacatcaaagtctgtagattgtttcttacatgattttgcaagtaaatcggagaacaagtataaagcagcatatatttacttcactgacttttgccctgataatctctttaacaaaattaaggcttcttgctccaagtcaataagaagatgtaaagaaataaatatttccttcattccacatgaatctcaggtgtatactcttgatgtaccagatgcattctattactggtatagtccagaccctggtaatgcaaagggaaaagatgccattatggaaacaatggctgaccagatagntacagtgtgtgccaccttggatgaaaatcccggagtaagatntaaaagtaaacctctagataatgncngtaagcttgcacagcttggttgaaaaaaagctttgaagactactacccggaatgatgaaaagannctaataangggaaaactca

SEQ ID NO: 1977 - DNA, 769 bp, Homo sapiens
  misc_feature (386)..(386): n equals a,t,g, or c
  misc_feature (549)..(549): n equals a,t,g, or c
  misc_feature (643)..(643): n equals a,t,g, or c
  misc_feature (659)..(659): n equals a,t,g, or c
  misc_feature (695)..(695): n equals a,t,g, or c
  misc_feature (703)..(703): n equals a,t,g, or c
gcgccactgaaggggagcttcccggagaacctgagacaccttaagaacaccatggagaccatagactggaaggtctttgagagctggatgcaccattggctcctgtttgaaatgagcaggcactccttggagcaaaagcccatgcagaatgccaccaagtatggcaacatgacagaggaccatgtgatgcacctgctccagaatgctgaccccctgaaggtgtacccgccactgaaggggagcttcccggagaacctgagacaccttaagaacaccatggagaccatagactggaaggtctttgagagctggaactggaggacccgtcttctgggctgggtgtgaccaagcaggatctgggcccagtccccatgtgagagcagcanaggcggtcttcaacatcctgccagccccacacagctacagctttcttgctcccttcagcccccagcccctcccccatctcccaccctgtacctcatcccatgagaccctggtgcctggctctttcgtcacccttggacaagacaaaccaagtcggaacagcanatagcaatgcagcaaggccctgctgcccaatctccatctgtcaacaggggcgtgaggtcccaggaagtggcccaaagctagacagatcccggtnctgacatcacagcaancttcaacacaagactccagactagctcatggaccanatgggaangcacagggagaagggtaaccctacaccagacccagctggacatgctgaatggcctttcccttcagg

SEQ ID NO: 1978 - DNA, 694 bp, Homo sapiens
  misc_feature (14)..(14): n equals a,t,g, or c
  misc_feature (311)..(311): n equals a,t,g, or c
  misc_feature (591)..(591): n equals a,t,g, or c
  misc_feature (601)..(601): n equals a,t,g, or c
  misc_feature (628)..(628): n equals a,t,g, or c
  misc_feature (681)..(681): n equals a,t,g, or c
  misc_feature (683)..(683): n equals a,t,g, or c
  misc_feature (694)..(694): n equals a,t,g, or c
gggcggcggcagtnctgggacagttgggtgcgttatggatacataacctgaggagccgggggaagctggccttgggtgttttacctcaatcatatatccacacaagtgcttctcttgacatttctcgaaaatgggagaagaagaataaaattgtttatcctccacaactgcctggagaacctcggagaccagcagaaatctaccactgtcgaagacaaataaaatatagcaaagacaagatgtggtatttggcaaaattgatacgaggaatgtctattgaccaggctttggcttaaattgggaattcaatngccaaaaaagggccaaaataattaaagaggttctcttagaagcacaagatatggcagtgagagaccataacgtggaattcaggtccaatttatatatagctgagtccacctcaggacgaggccagtgcctgaaacgcatccgctaccatggcagaggtcgctttgggatcatgggagaagggttattgccattattttgtgaaagttgggtgaaggcccccaccttcacctgagccaccaaagacggagttgccatgccaaagagatattcagcagcttngcagccggancatcgtcacactttatgatgaggagantagacttcacaggggatatatttggcattatttctaaaataaccaaaattgangnaaaaaaaaaan

SEQ ID NO: 1979 - DNA, 614 bp, Homo sapiens
  misc_feature (14)..(14): n equals a,t,g, or c
  misc_feature (505)..(505): n equals a,t,g, or c
  misc_feature (533)..(533): n equals a,t,g, or c
  misc_feature (545)..(545): n equals a,t,g, or c
  misc_feature (589)..(589): n equals a,t,g, or c
  misc_feature (595)..(595): n equals a,t,g, or c
  misc_feature (604)..(604): n equals a,t,g, or c
ggcgcatggctggngacccggttgccaatgtccgcttcaatgtggccaagtctctgcagaagatagggcccatcctggacaacagcaccttgcagagtgaagtcaagcccatcctagagaagctgacccaggaccaggatgtggacgtcaaatactttgcccaggaggctctgactgttctgtctctcgcctgatgctggaagaggagcaaacactggcctctggtgtccaccctccaacccccacaagtccctctttggggagacactggggggcctttggctgtcactccctgtgcatggtctgaccccaggccccttcccccagcacggttcctcctctccccagcctgggaagatgtctcactgtccacctcccaacgggctaggggagcacggggttggacaggacagtgaccttgggaggaaggggctactccgccacgtcagggagagatgtgagcatcccgggtcactggatcctgctgctgtaatgggaacccctnccccatttacttctccaccttccgtctncccatcattggnttttttttggggggcaactgtgccggttttaatttaatcctttnaatttnccccttttnacaagagaaa

SEQ ID NO: 1980 - DNA, 803 bp, Homo sapiens
  misc_feature (10)..(10): n equals a,t,g, or c
  misc_feature (18)..(18): n equals a,t,g, or c
  misc_feature (20)..(20): n equals a,t,g, or c
  misc_feature (32)..(32): n equals a,t,g, or c
  misc_feature (453)..(453): n equals a,t,g, or c
  misc_feature (600)..(600): n equals a,t,g, or c
  misc_feature (664)..(664): n equals a,t,g, or c
  misc_feature (730)..(730): n equals a,t,g, or c
  misc_feature (735)..(735): n equals a,t,g, or c
  misc_feature (782)..(782): n equals a,t,g, or c
  misc_feature (789)..(789): n equals a,t,g, or c
  misc_feature (802)..(802): n equals a,t,g, or c
gcgaaatacntctagttngnacttcctgcacntaccgctccggaattcccgggtcgacccacgcgtccggtctctagtagtgcagcttcggctggtgtcatcggtgtccttcctccgctgccgcccccgcaaggcttcgccgtcatcgaggccatttccagcgacttgtcgcacgcttttctatatacttcgttccccgccaaccgcaaccattgacgccatgtcgggttattcgagtgaccgagaccgcggccgggaccgagggtttggtgcacctcgatttggaggaagtagggcagggcccttatctggaaagaagtttggaaaccctggggagaaattagttaaaaagaagtggaatcttgatgagctgcctaaatttgagaagaatttttatcaagagcaccctgatttggctaggcgcacagcacaagaggtggaaacatacagaanaagcaaggaaattacagttagaggtcacaactgcccgaagccagttctaaatttttatgaagccaatttccctgcaaatgtcatggatgttattgcaagacagaatttcactgaacccactgctattcaagctcaaggatggccagntgctcttagtggattggatatggttggagtggcacagactggatctgggaaaacattggcttanttgcttcctggcattggccacatcaatcatcaaccattcctagagagaggcgatgggcctatttgnttggngcttggcaccaacttgggaactggcccaacaagtgcagcaaggaacntctgaanattggaaaagcang

SEQ ID NO: 1981 - DNA, 612 bp, Homo sapiens
  misc_feature (488)..(488): n equals a,t,g, or c
  misc_feature (506)..(506): n equals a,t,g, or c
  misc_feature (520)..(520): n equals a,t,g, or c
  misc_feature (555)..(555): n equals a,t,g, or c
  misc_feature (558)..(558): n equals a,t,g, or c
  misc_feature (564)..(564): n equals a,t,g, or c
  misc_feature (581)..(581): n equals a,t,g, or c
gctattttctctccaaggagaggataaaggaaactttagatccaattgatgaggtcgctgcactcatcgcagccaccattcatgatgtggatcaccctgggagaaccaactccttcctgtgtaatgctggaagtgagctggccattttgtacaatgacactgctgtgctggagagccaccatgcggccttggccttccagctgaccactggagatgataaatgcaatatatttaaaaacatggagaggaatgattatcggacactgcgccaggggattatcgacatggtcttagccacagaaatgacaaagcactttgagcatgtcaacaaatttgtcaacagcatcaacaaacccttggcaacactagaagaaaatggggaaactgataaaaaccaggaagtgataaacactatgcttaggactccagagaaccggaccctaatcaaacgaatgctgattaaatgtgctgatgtgtccaatccctgncgacccctgcagtactgnatcgagtgggctgnacgcatttcggaagaatatttttctcagactgatnaanaagaancagcaaggcttacctgnggtgatgccagtggttgacaagaaatacctg

SEQ ID NO: 1982 - DNA, 661 bp, Homo sapiens
  misc_feature (481)..(481): n equals a,t,g, or c
  misc_feature (511)..(511): n equals a,t,g, or c
  misc_feature (613)..(613): n equals a,t,g, or c
  misc_feature (615)..(616): n equals a,t,g, or c
  misc_feature (651)..(651): n equals a,t,g, or c
  misc_feature (659)..(659): n equals a,t,g, or c
gaagatcctttagggaagtgacttagcctggtctcttgcctgctctttcacggggaacaacgctaatcgcccacttagtctaagtcacgatgcttggatttgctgctaatcgtcggatttgagagtgggaacaagaaatccggacttttgctctcctttccgatgctgcctttaatgactcgtggagcagtttcctcatggatgtgctttcccctctgagcttcatcaaggtctcccatgtccgtatgcaggggatcctcttactggtctttgccaagtatcagcatttgccctatatccagattctgtctactaaatccacccccactggcctgtttgggtactgggggaacaaaggtggagtcaacatctgcctgaagctttatggctactatgtcagcatcatcaactgccacctgcctccccacatttccacaattaccagcggctggagcactttgaccggatcctggagatgcanaattgtgagggcgagacatccaaacatccnggaccacgacctcattatctggtttggagacatgaactttcggatcgaggactttgggttgcactttggttcgggaaatccatttaaaaaacggggctaacngnnggccctggggggaaaaaagggacccaggtttaaancaattggncc

SEQ ID NO: 1983 - DNA, 705 bp, Homo sapiens
  misc_feature (16)..(16): n equals a,t,g, or c
  misc_feature (543)..(543): n equals a,t,g, or c
  misc_feature (633)..(633): n equals a,t,g, or c
  misc_feature (635)..(635): n equals a,t,g, or c
  misc_feature (638)..(638): n equals a,t,g, or c
  misc_feature (670)..(670): n equals a,t,g, or c
  misc_feature (673)..(673): n equals a,t,g, or c
ttgggacttctgcacntaccgctccggaattcccgggtcgacccacgcgtccgccgggacccggtgtctgctcctgtcgccttcgcctcctaatccctagccactatgcgtgagtgcatctccatccacgttggccaggctggtgtccagattggcaatgcctgctgggagctctactgcctggaacacggcatccagcccgatggccagatgccaagtgacaagaccattgggggaggagatgactccttcaacaccttcttcagtgagacgggcgctggcaagcacgtgccccgggctgtgtttgtagacttggaacccacagtcattgatgaagttcgcactggcacctaccgccagctcttccaccctgagcagctcatcacaggcaaggaagatgctgccaataactatgcccgagggcactacaccattggcaaggagatcattgaccttgtgttggaccgaattcgcaagctggctgaccagtgcaccggtcttcagggcttcttggttttccacagctttggtgggggaactggntctgggttcacctccctgctcatggaacgtctctcaattgattatggcaagaaatccaagctggagttctccatttacccggcaccccangnttncacaagctgtagttgagccctacaacttcatnctnaccaaccacaccaacctggagcactcttaatg

SEQ ID NO: 1984 - DNA, 795 bp, Homo sapiens
  misc_feature (5)..(5): n equals a,t,g, or c
  misc_feature (12)..(12): n equals a,t,g, or c
  misc_feature (15)..(15): n equals a,t,g, or c
  misc_feature (17)..(17): n equals a,t,g, or c
  misc_feature (22)..(22): n equals a,t,g, or c
  misc_feature (502)..(502): n equals a,t,g, or c
  misc_feature (610)..(610): n equals a,t,g, or c
  misc_feature (615)..(615): n equals a,t,g, or c
  misc_feature (648)..(648): n equals a,t,g, or c
  misc_feature (651)..(651): n equals a,t,g, or c
  misc_feature (693)..(693): n equals a,t,g, or c
  misc_feature (700)..(700): n equals a,t,g, or c
  misc_feature (719)..(719): n equals a,t,g, or c
  misc_feature (725)..(725): n equals a,t,g, or c
  misc_feature (731)..(731): n equals a,t,g, or c
  misc_feature (742)..(742): n equals a,t,g, or c
  misc_feature (749)..(749): n equals a,t,g, or c
  misc_feature (782)..(782): n equals a,t,g, or c
actcncttaggnacntntgccngtaccgccccggaattcccgggtcgacccacgcgtccgcgcagccatggctcgtggtcccaagaagcatctgaagcgggtggcagctccaaagcattggatgctggataaattgaccggtgtgtttgctcctcgtccatccaccggtccccacaagttgagagagtgtctccccctcatcattttcctgaggaacagacttaagtatgccctgacaggagatgaagtaaagaagatttgcatgcagcggttcattaaaatcgatggcaaggtccgaactgatataacctaccctgctggattcatggatgtcatcagcattgacaagacgggagagaatttccgtctgatctatgacaccaagggtcgctttgctgtacatcgtattacacctgaggaggccaagtacaagttgtgcaaagtgagaaagatctttgtgggcacaaaaggaatccctcatctggtgactcatgatgcccgnaccatccgctaccccgatcccctcatcaaggtgaatgataccattcagattgatttagagactggcaagattactgatttcatcaaggtcgacactggtaacctgggnatggngactggaggtgctaacctaggaagaaatggtgngancaccaacagagagagggcaccctgggatctttttgacggggntcacggngaaaagaagcccaatgggnaacagnttttgncacttcggacnttttccnacaatttttgggtaattgggcaaagggccaacnaaacccatgggat

SEQ ID NO: 1985 - DNA, 704 bp, Homo sapiens
  misc_feature (8)..(8): n equals a,t,g, or c
  misc_feature (545)..(545): n equals a,t,g, or c
  misc_feature (612)..(612): n equals a,t,g, or c
  misc_feature (644)..(645): n equals a,t,g, or c
  misc_feature (654)..(654): n equals a,t,g, or c
  misc_feature (669)..(669): n equals a,t,g, or c
tctcgganactccctttaggtacgtctgccggtaccgccccggaattcccgggtcgacccacgcgtccggagcgcgcggtcacagggtgccgctgaccgaggcgtgcaaagactccagaattggaggcatgatgaagactctgctgctgtttgtggggctgctgctgacctgggagagtgggcaggtcctgggggaccagacggtctcagacaatgagctccaggaaatgtccaatcagggaagtaagtacgtcaataaggaaattcaaaatgctgtcaacggggtgaaacagataaagactctcatagaaaaaacaaacgaagagcgcaagacactgctcagcaacctagaagaagccaagaagaagaaagaggatgcccttctctccgtacgagcccctgaacttccacgccatgttccagcccttccttgagatgatacacgaggctcagcaggccatggacatccacttccatagcccggccttccagcacccgcaacagaattcatacgagaaggcgacgatgaccggactgtgtgccgngagatccgccacaactccacgggctgcctgcggatgaaggaccagtgtgacaagtgccgggagatcntgtctgtgggactggttccaccaataaccccnnccaggctanagcttgcgaccgggnagctcgacgaatcccctccaggtcgcttgagaggg

SEQ ID NO: 1986 - DNA, 821 bp, Homo sapiens
  misc_feature (18)..(18): n equals a,t,g, or c
  misc_feature (21)..(22): n equals a,t,g, or c
  misc_feature (35)..(35): n equals a,t,g, or c
  misc_feature (77)..(77): n equals a,t,g, or c
  misc_feature (514)..(514): n equals a,t,g, or c
  misc_feature (651)..(651): n equals a,t,g, or c
  misc_feature (653)..(653): n equals a,t,g, or c
  misc_feature (667)..(667): n equals a,t,g, or c
  misc_feature (711)..(711): n equals a,t,g, or c
  misc_feature (721)..(721): n equals a,t,g, or c
  misc_feature (725)..(725): n equals a,t,g, or c
  misc_feature (731)..(731): n equals a,t,g, or c
  misc_feature (777)..(777): n equals a,t,g, or c
  misc_feature (799)..(799): n equals a,t,g, or c
  misc_feature (808)..(808): n equals a,t,g, or c
  misc_feature (811)..(811): n equals a,t,g, or c
tattgacactcctatggnacnnctgcccgtaccgntccggaattcccgggtcgacccacgcgtccggcgcctcggangcgttcagctgcttcaagatgaagctgaacatctccttcccagccactggctgccagaaactcattgaagtggacgatgaacgcaaacttcgtactttctatgagaagcgtatggccacagaagttgctgctgacgctctgggtgaagaatggaagggttatgtggtccgaatcagtggtgggaacgacaaacaaggtttccccatgaagcagggtgtcttgacccatggccgtgtccgcctgctactgagtaaggggcattcctgttacagaccaaggagaactggagaaagaaagagaaaatcagttcgtggttgcattgtggatgcaaatctgagcgttctcaacttggttattgtaaaaaaaggagagaaggatattcctggactgactgatactacagtgcctcgccgcctgggccccaaaagagctagcanaatccgcaaacttttcaatctctcttaagaagatgatgtccgccagtatgttgtaagaaagcccttaaataaagaaggtaagaaacctaggaccaaagcacccaagattcagcgtcttggtactccacgtgtcctgnancacaaacggcggcntaatggtcttaagaagcaggcgtaccaagaaaaattaaagaaanaggcttgcanaaanatgctnaactttttgggccaagaagaaatggaaggaaggcttaaggagaaancggcccgggaacaaaattgcgnaaaaagacncanacttttctct

SEQ ID NO: 1987 - DNA, 780 bp, Homo sapiens
  misc_feature (626)..(626): n equals a,t,g, or c
  misc_feature (712)..(712): n equals a,t,g, or c
  misc_feature (720)..(720): n equals a,t,g, or c
  misc_feature (779)..(779): n equals a,t,g, or c
ggaaacgcttggtgatacaagataaaaataaatacaacacacccaaatacaggatgatagttcgtgtgacaaacagagatatcatttgtcagattgcttatgcccgtatagagggggatatgatagtctgcgcagcgtatgcacacgaactgccaaaatatggtgtgaaggttggcctgacaaattatgctgcagcatattgtactggcctgctgctggcccgcaggcttctcaataggtttggcatggacaagatctatgaaggccaagtggaggtgactggtgatgaatacaatgtggaaagcattgatggtcagccaggtgccttcacctgctatttggatgcaggccttgccagaactaccactggcaataaagtttttggtgccctgaagggagctgtggatggaggcttgtctatccctcacagtaccaaacgattccctggttatgattctgaaagcaaggaatttaatgcagaagtacatcggaagcacatcatgggccagaatgttgcagattacatgcgctacttaatggaagaagatgaagatgcttacaagaaacagttctctcaatacataaagaacagcgtaacttcagacatgatggaagagatgtataanaaagctcatgctgctataccagagaatccagctatgaaaagaacccaagaagaagttaaaagaagaggtggaaccgtcccaaatgncccttgtnaaaaaaaggatcggtagttaaaagaagcaagcttctcaaacttaagaacggcttgttana

SEQ ID NO: 1988 - DNA, 753 bp, Homo sapiens
  misc_feature (29)..(29): n equals a,t,g, or c
  misc_feature (299)..(299): n equals a,t,g, or c
  misc_feature (379)..(379): n equals a,t,g, or c
  misc_feature (392)..(392): n equals a,t,g, or c
  misc_feature (395)..(395): n equals a,t,g, or c
  misc_feature (445)..(445): n equals a,t,g, or c
  misc_feature (465)..(465): n equals a,t,g, or c
  misc_feature (491)..(491): n equals a,t,g, or c
  misc_feature (501)..(501): n equals a,t,g, or c
  misc_feature (506)..(506): n equals a,t,g, or c
  misc_feature (512)..(512): n equals a,t,g, or c
  misc_feature (518)..(518): n equals a,t,g, or c
  misc_feature (525)..(525): n equals a,t,g, or c
  misc_feature (529)..(529): n equals a,t,g, or c
  misc_feature (556)..(556): n equals a,t,g, or c
  misc_feature (570)..(570): n equals a,t,g, or c
  misc_feature (585)..(585): n equals a,t,g, or c
  misc_feature (590)..(590): n equals a,t,g, or c
  misc_feature (599)..(599): n equals a,t,g, or c
  misc_feature (648)..(648): n equals a,t,g, or c
  misc_feature (690)..(690): n equals a,t,g, or c
ggtgatgcccactctgcgccaggccgctnaagacaagtcctggcgcgtccgctacatggtggctgacaagttcacagagctccagaaagcagtggggcctgagatcaccaagacagacctggtccctgccttccagaacctgatgaaagactgtgaggccgaggtgagggccgcagcctcccacaaggtcaaagagttctgtgaaaacctctcagctgactgtcgggagaatgtgatcatgtcccagatcttgccctgcatcaaggagctggtgtccgatgccaaccaacatgtcaagnctgcctgggcttaagcatcatgggtcttctcttccatcttgggcaaaggacaacaccatcgagcaacctcttggcccttnttcctgggttaanctngaaggaatgaagtggcccttgagggtacgggcttgaaccattcaatcttnttaaaccttggaacttggtnttgaaaccgaagggtggaattgggcnaattccgggnaaagntttgtnccccangtccccntggntttcccttgcccaattggtgggaaacntgggctttgaaggnaacgcccaaggtggncgggnttgcccggnttgggccatcattggagtacatgccccttcctgggttggacaggttggnaatggagttcttttgatgagaaacttaactccttggcatggnctggtttgggatatggatatgccatccggagcagcaccagaacctgaaaactagtggaaagtt

SEQ ID NO: 1989 - DNA, 785 bp, Homo sapiens
  misc_feature (7)..(8): n equals a,t,g, or c
  misc_feature (37)..(37): n equals a,t,g, or c
  misc_feature (48)..(48): n equals a,t,g, or c
  misc_feature (607)..(607): n equals a,t,g, or c
  misc_feature (615)..(615): n equals a,t,g, or c
  misc_feature (681)..(681): n equals a,t,g, or c
  misc_feature (769)..(769): n equals a,t,g, or c
  misc_feature (782)..(783): n equals a,t,g, or c
ggggggnntaacgggcatctccgacactatagttggnacgcctgcacntaccggtccggaattcccgggtcgacccacgcgtccggggagatctggatggcatctacttcgtatgactattgcagagtgcccatggaagacggggataagcgctgtaagcttctgctggggataggaattctggtgctcctgatcatcgtgattctgggggtgcccttgattatcttcaccatcaaggccaacagcgaggcctgccgggacggccttcgggcagtgatggagtgtcgcaatgtcacccatctcctgcaacaagagctgaccgaggcccagaagggctttcaggatgtggaggcccaggccggcacctgcaaccacactgtgatggccctaatggctttcctggatgcagaagaaggcccaaggacaaaagaaagtggaggagcttgagggagagatcactacattaaaccataagcttcaggacgcgtctgcagaggtggagcgactgagaagagaaaaccaggtcttaagcgtgagaatcgcggacaagaagtactaccccagctcccaggactccagctccgctgcggccgccccagctgctgantgtgctgnttggcctcagcgctcttgcttgcaagtgagatcccaggaaagctggcacatcttgggaaggtccgncctggttcggctttttcgctttgaacaattcccttggatcctaatcaagttttgaacgggtcaatggggcaacacgggttaagcgggnaaaaagcacgggnnta

SEQ ID NO: 1990 - DNA, 409 bp, Homo sapiens
agccacattatgggacctaatgacagcccatatcaaggcggtgtattctttttgacaattcattttcctacagactaccccttcaaaccacctaaggttgcatttacaacaagaatttatcatccaaatattaacagtaatggcagcatttgtctcgatattctaagatcacagtggtcgcctgctttaacaatttctaaagttcttttatccatttgttcactgctatgtgatccaaacccagatgaccccctagtgccagagattgcacggatctataaaacagacagagataagtacaacagaatatctcgggaatggactcagaagtatgccatgtgatgctaccttaaagtcagaataacctgcattatagctggaataaactttaaattactgttcctttttt

SEQ ID NO: 1991 - DNA, 329 bp, Homo sapiens
ccggttcccgggaggatgaagttcgtgtacaaagaagagcatccgttcgagaagcgccgctctgagggcgagaagatccgaaagaaatacccggaccgggtgccggtgatagtagaaaaggctcccaaagctcggataggagacctggacaaaaagaaatacctggtgccttctgatctcacagttggtcagttctacttcttgatccggaagcgaattcatctccgagctgaggatgccttgtttttctttgtcaacaatgtcattccacccaccagtgccacaatgggtcagctgtaccaggaacaccatgaagaagacttctttct

SEQ ID NO: 1992 - DNA, 682 bp, Homo sapiens
  misc_feature (12)..(12): n equals a,t,g, or c
  misc_feature (401)..(401): n equals a,t,g, or c
  misc_feature (416)..(416): n equals a,t,g, or c
  misc_feature (460)..(460): n equals a,t,g, or c
  misc_feature (552)..(552): n equals a,t,g, or c
  misc_feature (557)..(557): n equals a,t,g, or c
  misc_feature (601)..(601): n equals a,t,g, or c
  misc_feature (623)..(623): n equals a,t,g, or c
  misc_feature (629)..(629): n equals a,t,g, or c
gggggtcggccngggggtcccgggggaggtggagatggtgaaggggcagccgttcgacgtgggcccgcgctacacgcagttgcagtacatcggcgagggcgcgtacggcatggtcagctcggcctatgaccacgtgcgcaagactcgcgtggccatcaagaagatcagccccttcgaacatcagacctactgccagcgcacgctccgggagatccagatcctgctgcgcttccgccatgagaatgtcatcggcatccgagacattctgcgggcgtccaccctggaagccatgagagatgtctacattgtgcaggacctgatggagactgacctgtacaagttgctgaaaagccagcagctgagcaatgaccatatctgctacttctctaccagatcctgcnggcctcaagtacatncactccgcaacgtgctcaccgagatctaaagcccttcaacctgntcatcaacaccactgcgaccttaagatttggattcggcctgcccggattgccgatctgacatgaccacaccggtttctgacggatatgtggntaccnctggaccggcccaaaatatgttaactcaagctttccaagtcatnaaattggctgtggctgatttgntgaatnttttaacggccatttctggaagactactgatagtaacatttggatctggtcca

SEQ ID NO: 1993 - DNA, 639 bp, Homo sapiens
  misc_feature (15)..(15): n equals a,t,g, or c
  misc_feature (284)..(284): n equals a,t,g, or c
  misc_feature (318)..(318): n equals a,t,g, or c
  misc_feature (341)..(341): n equals a,t,g, or c
  misc_feature (380)..(380): n equals a,t,g, or c
  misc_feature (470)..(470): n equals a,t,g, or c
  misc_feature (477)..(477): n equals a,t,g, or c
  misc_feature (486)..(486): n equals a,t,g, or c
  misc_feature (505)..(505): n equals a,t,g, or c
  misc_feature (572)..(572): n equals a,t,g, or c
  misc_feature (582)..(582): n equals a,t,g, or c
  misc_feature (611)..(611): n equals a,t,g, or c
  misc_feature (621)..(621): n equals a,t,g, or c
  misc_feature (636)..(636): n equals a,t,g, or c
gggggtcggcccgtnggtcccgggggaggtggagatggtgaaggggcagccgttcgacgtgggcccgcgctacacgcagttgcagtacatcggcgagggcgcgtacggcatggtcagctcggcctatgaccacgtgcgcaagactcgcgtggccatcaagaagatcagccccttcgaacatcagacctactgccagcgcacgctccgggagatccagatcctgctgcgcttccgccatgagaatgtcatcggcatccgagacattctgcgggcgtccaccctgnaaagccatgagagatgtctacattgtgcaggacncgtcttcccacttttcctctttnctttaagaaaacttactaaaaaatgtttcattgcgaaancagaggaaaagaaacgttttcagacctaaaggaaatgtttggtcatgttaagaaaacaaattattcattcatatgatgctttcttaacgnttgaaantgcacattnacattggactgagactttnaagataacttttacatacttttggttaaacccctttgaaatgtataaaaagttatttacagttctanaatgtaatgnttttaaccttctatctttttaggacacantttgtttaancaatatggttttggnctt

SEQ ID NO: 1994 - DNA, 758 bp, Homo sapiens
  misc_feature (12)..(12): n equals a,t,g, or c
  misc_feature (29)..(29): n equals a,t,g, or c
  misc_feature (272)..(272): n equals a,t,g, or c
  misc_feature (275)..(276): n equals a,t,g, or c
  misc_feature (280)..(280): n equals a,t,g, or c
  misc_feature (289)..(289): n equals a,t,g, or c
  misc_feature (296)..(297): n equals a,t,g, or c
  misc_feature (300)..(301): n equals a,t,g, or c
  misc_feature (306)..(307): n equals a,t,g, or c
  misc_feature (310)..(313): n equals a,t,g, or c
  misc_feature (505)..(505): n equals a,t,g, or c
  misc_feature (547)..(547): n equals a,t,g, or c
  misc_feature (568)..(568): n equals a,t,g, or c
  misc_feature (580)..(580): n equals a,t,g, or c
  misc_feature (605)..(605): n equals a,t,g, or c
  misc_feature (607)..(607): n equals a,t,g, or c
  misc_feature (635)..(635): n equals a,t,g, or c
  misc_feature (640)..(640): n equals a,t,g, or c
  misc_feature (668)..(668): n equals a,t,g, or c
  misc_feature (691)..(691): n equals a,t,g, or c
  misc_feature (702)..(702): n equals a,t,g, or c
  misc_feature (714)..(714): n equals a,t,g, or c
  misc_feature (719)..(719): n equals a,t,g, or c
gaagaatctcantttgaaaggaccagttngaatgcctaccaagactttgagaatcactacaagaaaaactccttgtggtgaaggttctaagacgtgggatcgtttccagatgagaattcacaagcgactcattgacttgcacagtccttctgagattgttaagcagattacttccatcagtattgagccaggagttgaggtggaagtcaccattgcagatgcttaagtcaactattttaataaattgatgaccagttgttaaaaaaaaaaanaannaaanaaaaatatnatattanntannttttnnttnnnnaaactatgacaccaagggtcgcttttgctgtacatcgtattacacctgaggaggccaagtacaagtttgtgcaaagtgagaaagatctttgtgggcacaaaaggaatccctcatctggtgactcatgatgcccgcaccatccgctaccccgatccctcatcaaggtgaatgataccattcagattgatttanagactggcaagattactgatttcatcaagttcgacactgggnacctgtgtatggtgactggangtgctaacctangaagaattggtgtgatcaccaacananagaggcaccctggatctttgacgtggtnacgtnaaagatgccatggcaacagctttgccantcgactttccaacattttggtanttggcaagggnacaaaccatggnttctnttcccgaggaaagggatccgctaacattgttgaaaaagg

SEQ ID NO: 1995 - DNA, 401 bp, Homo sapiens
  misc_feature (7)..(7): n equals a,t,g, or c
  misc_feature (82)..(82): n equals a,t,g, or c
  misc_feature (84)..(84): n equals a,t,g, or c
  misc_feature (120)..(120): n equals a,t,g, or c
  misc_feature (159)..(159): n equals a,t,g, or c
  misc_feature (166)..(166): n equals a,t,g, or c
  misc_feature (189)..(189): n equals a,t,g, or c
  misc_feature (209)..(210): n equals a,t,g, or c
  misc_feature (222)..(222): n equals a,t,g, or c
  misc_feature (228)..(228): n equals a,t,g, or c
  misc_feature (245)..(245): n equals a,t,g, or c
  misc_feature (250)..(250): n equals a,t,g, or c
  misc_feature (255)..(255): n equals a,t,g, or c
  misc_feature (269)..(269): n equals a,t,g, or c
  misc_feature (274)..(274): n equals a,t,g, or c
  misc_feature (276)..(276): n equals a,t,g, or c
  misc_feature (279)..(279): n equals a,t,g, or c
  misc_feature (283)..(283): n equals a,t,g, or c
  misc_feature (294)..(295): n equals a,t,g, or c
  misc_feature (327)..(327): n equals a,t,g, or c
  misc_feature (332)..(332): n equals a,t,g, or c
  misc_feature (340)..(340): n equals a,t,g, or c
  misc_feature (361)..(361): n equals a,t,g, or c
  misc_feature (388)..(388): n equals a,t,g, or c
ggctcgnggtcccaagaagcatctgaagcgggtggaagctccaaagcattgggatgctggataaattgaccggtggtgttcngntcttcgtccatccaaccggtccccacaaggttgaanagagtggctccccctcatcattttcctgaggaacaaganttaaggntgccctgaccaggagatgaatcnttagaagattttgcatgcanngggttcattaanatcganggcaaggggtccaactnggtantaccnaaccttggtggatntcatngntgncatnaacatttgacnngactgggagagaattttcgctgatctatgacnccaangggccgtnttgctgtacatcgtattacancctgaggaggccaagtccaagtttttnaaagcgttgaaaa

SEQ ID NO: 1996 - DNA, 472 bp, Homo sapiens
  misc_feature (52)..(52): n equals a,t,g, or c
  misc_feature (54)..(54): n equals a,t,g, or c
  misc_feature (58)..(59): n equals a,t,g, or c
  misc_feature (121)..(121): n equals a,t,g, or c
  misc_feature (170)..(170): n equals a,t,g, or c
  misc_feature (253)..(253): n equals a,t,g, or c
  misc_feature (297)..(297): n equals a,t,g, or c
  misc_feature (335)..(335): n equals a,t,g, or c
  misc_feature (349)..(349): n equals a,t,g, or c
  misc_feature (355)..(355): n equals a,t,g, or c
  misc_feature (419)..(419): n equals a,t,g, or c
  misc_feature (442)..(442): n equals a,t,g, or c
  misc_feature (450)..(450): n equals a,t,g, or c
  misc_feature (458)..(458): n equals a,t,g, or c
  misc_feature (470)..(470): n equals a,t,g, or c
ggcacgagagcgggccctgcaggagaagctgaaggactttcctgagtgcgtnanacanngccggagcccgaggacgatgcagaagagggacttgggggtcttcccagcaacatcagctctntcagctccttgctgctcttcaacaccaccgagaacctgtatggccaganggcagggccgaggggtgtgggcgggaggcccggcctggcttagtggggacccagggcatcagacacaggtacagcacataggncaggagccagggggtgactggggtggctcggcttgggaggcctnggaccccacagtggcacgctgtgccccttaatgatgtngggagaggaacatngggttnaggacagcgggcgttcaattttgccttgacccccatgtttggcttccttaggtaccaagaaggnttttttttcctgggacccctggntttgggtnttttaaanaaaagacccttntt

SEQ ID NO: 1997 - DNA, 397 bp, Homo sapiens
cagacgtggcgacccgctgaatttaagcatattagtcagcggaggagaagaaactaaccaggattccctcagtaacggcgagtgaacagggaagagcccagcgccgaatccccgccccgcggcggggcgcgggacatgtggcgtacggaagacccgctccccggcgccgctcgtggggggcccaagtccttctgatcgaggcccagcccgtggacggtgtgaggccggtagcggcccccggcgcgccgggcccgggtcttcccggagtcgggttgcttgggaatgcagcccaaagcgggtggtaaactccatctaaggctaaataccggcacgagaccgatagtcaacaagtaccgtaaggaaagttgaaaagaactttgaagagagagttcaagaa

SEQ ID NO: 1998 - DNA, 364 bp, Homo sapiens
  misc_feature (11)..(11): n equals a,t,g, or c
  misc_feature (14)..(14): n equals a,t,g, or c
  misc_feature (16)..(16): n equals a,t,g, or c
  misc_feature (30)..(30): n equals a,t,g, or c
  misc_feature (46)..(46): n equals a,t,g, or c
  misc_feature (165)..(165): n equals a,t,g, or c
  misc_feature (356)..(358): n equals a,t,g, or c
  misc_feature (360)..(360): n equals a,t,g, or c
  misc_feature (362)..(362): n equals a,t,g, or c
cgtgcacactnatnanaccgcacgcctgcnggtgaccggtccgggnattcccgggtcgacccacgcgtccgatacaggaaaccctgggagagtctgggagtttacttccaaataaattgaataagttgttacagaggtttcctaacaaaccttacctcagctganaatggacaagtattttcaatgactgacatatagcttctgcacaactatgcagaggcattttagagacattggcattgccatgccctctttggagggtagaagaggcaaaacacttttttcaccctttggaatcatagtatgggtagaagttatgatttatcttgaaataaaatcctctgaaacagaaaacnnnanancc

SEQ ID NO: 1999 - DNA, 541 bp, Homo sapiens
  misc_feature (429)..(429): n equals a,t,g, or c
  misc_feature (437)..(437): n equals a,t,g, or c
  misc_feature (499)..(499): n equals a,t,g, or c
  misc_feature (529)..(529): n equals a,t,g, or c
  misc_feature (534)..(534): n equals a,t,g, or c
ccgcttcctggttcatgtgcggccttcgttccctcgctatctcgaccttgacttcgcatgtgcatccgccgaagtctttctagatcaatcggccccatctctcgtcttcccgattcggccatgacctcacccgtatcctcgacgtaggacctcggacttcatttccgccaccccgacacttccggaatccccggaagcgacccgttgccatggcgactatgtacacagccaggcagccccgcgtggggagtgcaggtggtttcggttgcggcagtcgcgtcccgggagcgtcgctgcctggtgaacgctagaatgggtactaggaaaaaattcatgcatttgtccgtgtcaaaccaccgatgactttgctcatgaaatgatcagatacggagatgacaaaagaacattgatattcacttaaaaaaaganattcgganaagaattgtccataaccaacagacagactggtccttttaagttggatggaattcttcccgangcccccaaggaattgggtttatgaaaacanttgcnaaggatt

SEQ ID NO: 2000 - DNA, 297 bp, Homo sapiens
  misc_feature (3)..(3): n equals a,t,g, or c
  misc_feature (290)..(290): n equals a,t,g, or c
ggncacgagccttcatctacgtatactatcctacatcaaacgagggttcacctgctctcatacttcaatatttctcttttgtttcaccatctgttaaatgataatttgtacatacatctgaattctggatcctaactctccctgtcttatcaaagaccttccacttctttcctgtattggcaacctttctctttatttgttcttttcctatcaacagtaaacatacttgaagatttgttgggagagggaatcctaaaattaaaaaaaaaaaaaaaaaactcgagaccggnacggggg

SEQ ID NO: 2001 - DNA, 650 bp, Homo sapiens
  misc_feature (489)..(489): n equals a,t,g, or c
  misc_feature (536)..(536): n equals a,t,g, or c
  misc_feature (606)..(607): n equals a,t,g, or c
  misc_feature (613)..(613): n equals a,t,g, or c
  misc_feature (618)..(618): n equals a,t,g, or c
  misc_feature (640)..(640): n equals a,t,g, or c
agctctaatacgactcactatagggaaagctggtacgcctgcaggtaccggtccggaattcccgggtcgacccacgcgtccgcccacgcgtccgtggctttcgtcttcggtttttctcttccttcgctaacgcctcccggctctcgtcagcctcccgccggccgtctccttaacaccgaacaccatgccttcaattaagttgcagagttctgatggagagatatttgaagttgatgtggaaattgccaaacaatctgtgactattaagaccatgttggaagatttgggaatggatgatgaaggagatgatgacccagttcctctaccaaatgtgaatgcagcaatattaaaaaaggtcattcagtggtgcacccaccacaaggatgaccctcctcctcctggaagatgatgagaacaaagaaaagcgaacagatgatatccctgtttgggaccaagattcctgaaattgaccaaggaacatttttgaantcatctgggtgcaaattattagacatcaaaggttgttgatgttacangcaagatgttgccatatgatcaggggaaattctgaggggttcgcagaccttcatttcaaaatgatttatnnaggggnggagnccagtaggaagggaccatggtntgagggagtg

SEQ ID NO: 2002 - DNA, 368 bp, Homo sapiens
  misc_feature (259)..(259): n equals a,t,g, or c
  misc_feature (303)..(303): n equals a,t,g, or c
  misc_feature (321)..(321): n equals a,t,g, or c
  misc_feature (331)..(331): n equals a,t,g, or c
  misc_feature (356)..(356): n equals a,t,g, or c
  misc_feature (365)..(365): n equals a,t,g, or c
ctactactcaacttaaactccagcaccacgaccctactactatctcgcacctgaaacaagctaacatgactaacacccttaattccatccaccctcctctccctaaggaggcctgcccccgctaaccggctttttgcccaaatgggccattatcgaagaattcacaaaaaacaatagcctcatcatccccaccatcatagccaccatcaccctccttaacctctacttctacctacgcctaatctactccacctcaatnacactactccccatatctaacaacgtaaaaataaaatgacagtntgaacatacaaaacccancccattcctncccacactcatcggccttaccaagntaattctantat

SEQ ID NO: 2003 - DNA, 423 bp, Homo sapiens
  misc_feature (5)..(5): n equals a,t,g, or c
  misc_feature (390)..(390): n equals a,t,g, or c
  misc_feature (401)..(402): n equals a,t,g, or c
  misc_feature (413)..(414): n equals a,t,g, or c
ggcanaggttttggacaatgctggtgtgaaaggtgaagggaatcctgagtgtttgctgtgctccaggctcagtacaaattttattttattatacacttaaagcaaaagtcttataaaagttgaggatgaagccaagagtggtggtaagggtaggagttgaaacagtgaagaggaataacagggaagagtcctgccctgagagactcatggaataggatatttacaaggcaaagcaaagagaaccaaagtcttcagttctgcagaggagctgagtgccccaggagcttagtggagggtgaggtccaatgtgtgctccatcttgaaaggaaaaactcatgggaagaggaaggtgctaatgttgaacactattttgcggccaaaccccttaantgttttaaaannttgaggtttcnncatgaggtc

SEQ ID NO: 2004 - DNA, 550 bp, Homo sapiens
  misc_feature (439)..(439): n equals a,t,g, or c
agcaactctatagatcatagaggaaacggtacctgcagtaccggtccggaattcccgggtcgacccacgcgtccggcactgcatgggaaatagcggccctggaggatgttagacttgctccctctccaagacagcagcagcctgcacctgccccgtgtgtgtggccggcctcctcctcacccttcccggcccccggccaaggacccaggcgctgcatacaggggaggggcgcacccacagctggggccggttttcctcagctctaggctgttctgtagcttatctgcccctcccccactttcaagacagatgagcaggagcttgggtctctctcggcccctgtctgttcccagcccctgcagattctgagcaaaggccctgggtaagaagggtgggagtggggcctttgccagcagagccagggcagggcgagctgcangaatcaaccctctgcccctgcagctggaatgtgccacagaagccccacctgaagggttgatgtgctggagggttgccagagccatactggtcaacctgagctcggggaaag

SEQ ID NO: 2005 - DNA, 349 bp, Homo sapiens
  misc_feature (88)..(88): n equals a,t,g, or c
  misc_feature (108)..(108): n equals a,t,g, or c
  misc_feature (135)..(135): n equals a,t,g, or c
  misc_feature (141)..(141): n equals a,t,g, or c
cccacgcgtccgtacggctgcgagaagacgacagaagggtacggctgcgagaagacgacagaagggtacggctgcgagaagacgacanaagggtacgcctgcgagaanacgacagaagctacggctgcgagaagncgacanaagggtacggctgcgagaagacgacagaaggggccggccatcgcagccattttggcttcctgaccttgggctacggctgaccgttttttgtggtgtactccatgccatcatgtccgtcctgacgccgctgctgctgcggggcttgacaggctcggcccggcggctcccagtgccgcgcgccaagatccattcgttgccgccggagggg

SEQ ID NO: 2006 - DNA, 472 bp, Homo sapiens
  misc_feature (408)..(408): n equals a,t,g, or c
  misc_feature (417)..(417): n equals a,t,g, or c
  misc_feature (422)..(422): n equals a,t,g, or c
  misc_feature (438)..(438): n equals a,t,g, or c
  misc_feature (446)..(446): n equals a,t,g, or c
taatacgactcactatagggaaagctggtacgcctgcaggtaccggtccggaattcccgggtcgacccacgcgtccggtacccggagcacggagatctcgccggctttacgttcacctcggtgtctgcagcaccctccgcttcctctcctaggcgacgagacccagtggctagaagttcaccatgtctattctcaagatccatgccagggagatctttggactctcgcgggaatcccactgttgaggttgatctcttcacctcaaaaggtctcttcagagctgctgtgcccagtggtgcttcaactggtatctatggaggccctagagctccggggacaatggataagactcgctatatgggggaagggtgtctccaaaggctgttggagtgacatccaatgaaaacnattggcgcnggccntggtttagcaagaaanggaacgtncacagaacaagagaagattgacaaac

SEQ ID NO: 2007 - DNA, 412 bp, Homo sapiens
  misc_feature (163)..(163): n equals a,t,g, or c
  misc_feature (178)..(178): n equals a,t,g, or c
  misc_feature (212)..(213): n equals a,t,g, or c
  misc_feature (275)..(275): n equals a,t,g, or c
  misc_feature (301)..(301): n equals a,t,g, or c
  misc_feature (366)..(366): n equals a,t,g, or c
  misc_feature (372)..(372): n equals a,t,g, or c
  misc_feature (391)..(391): n equals a,t,g, or c
  misc_feature (396)..(396): n equals a,t,g, or c
  misc_feature (398)..(398): n equals a,t,g, or c
gagaaactgttaaagagattcatctgtgtattactgacaaggttttttttgtttgttgcttgctttggtaattgaattctgaagaatttatctgcatgacgataactaggcattctatccatttgtagatcagagaaagtgaagagattatatattagtactnaaatttttacatttnccaaatgaatgaaaatgtatgtttctttgtactnntttaaaaatcagcttagtaacaatactatatggtttcaactagtaggtaatctgcttatatntctaatgcaaacttaacaattgtgtnctttttaaaagctgcaatatgtgatggaaaatagctgtgggtcaattttgttatccatatttcanactccnttttagataccatggtggnttttntnttttaagtttttta

SEQ ID NO: 2008 - DNA, 743 bp, Homo sapiens
  misc_feature (535)..(535): n equals a,t,g, or c
  misc_feature (557)..(557): n equals a,t,g, or c
  misc_feature (656)..(656): n equals a,t,g, or c
  misc_feature (699)..(699): n equals a,t,g, or c
  misc_feature (706)..(706): n equals a,t,g, or c
  misc_feature (733)..(734): n equals a,t,g, or c
gcatattattataagtacatttagaattgttcttttcaggatcaaaaccacatcacttacataagctttgatctaccagggatgttggatgacagttcttgtccacgtctcagattaagaacatcttattttaccttgcagtgaaagtaagtgaacacagtctcctgccccttatgctggagcagtttccgtttctttatgtttctggcccaacactaagcaaaatgtggaaacagcaaattgcacaggttgaacagcttaagaaagaagcatgtagagaaaatcgatcaaagaagaaactccaagatgaagtaagttactgtcagtcttaagcataggaatttaaatgagaagagcttatccttaagaatttagtgaacagcattattaacctacttaacttcatgtcccccttcaagatagaagaagccctaagaaggcatgacctccttactacccttgtcaagaaagaatatgaacataacaagagactggtatgtcaagagcaagttgggtattataattctgaatttgntatattcattccctttatctgngctagctgggcaacagttgcacagacccttaacctcttaacacctgcatgtggaagtgttgcctaggtcttttaaccaaaattgatagcccatgcctgnaatcccagcactttgggaggctgaggtgaagaggatcacttgngaccagnctcagcaccataagtgggaccctggcnnttaaaatat

SEQ ID NO: 2009 - DNA, 644 bp, Homo sapiens
  misc_feature (355)..(355): n equals a,t,g, or c
  misc_feature (358)..(358): n equals a,t,g, or c
  misc_feature (447)..(447): n equals a,t,g, or c
  misc_feature (539)..(539): n equals a,t,g, or c
  misc_feature (581)..(581): n equals a,t,g, or c
  misc_feature (587)..(587): n equals a,t,g, or c
  misc_feature (596)..(596): n equals a,t,g, or c
  misc_feature (636)..(636): n equals a,t,g, or c
  misc_feature (643)..(643): n equals a,t,g, or c
gggcgagtcgggcgccaagcgcggggccggagcggccttcccggagtcctttgcgcggcacctggcgacaaaatggctgcccgagggagacgggcggagcctcagggccgggaggctccgggccccgcgggcggtggcggtggcgggagccgttgggctgagtcgggatcggggacgtcgcccgagagcggggacgaggaggtgtcgggcgcgggttcgagcccggtgtcgggcggcgtgaacttgttcgccaacgacggcagcttcctggagctgttcaagcggaagatggaggaggagcagcggcagcggcaggaggagccgccccgggtccgcagcgacccgaccagtcggncgncgccgctggccccggggatccgaagaggaagggcggtccgggcttcacacttagcttcgtgggcaaacgcagaggcgggaacaaactanccctcaagacgggaatagtagccaagaagcagaagacggaggatgaggtattaacaaagtaaaaggtgaccctgggccaaagtacatggcanaagtgaaaaagtacaaagcttaccaatgcggtgacaatgatnaaactnggccctggngaaatgacgccccttccccacttgccatgggctgggactntttggang

SEQ ID NO: 2010 - DNA, 784 bp, Homo sapiens
  misc_feature (17)..(17): n equals a,t,g, or c
  misc_feature (588)..(588): n equals a,t,g, or c
  misc_feature (604)..(604): n equals a,t,g, or c
  misc_feature (717)..(717): n equals a,t,g, or c
  misc_feature (731)..(731): n equals a,t,g, or c
  misc_feature (752)..(752): n equals a,t,g, or c
  misc_feature (758)..(758): n equals a,t,g, or c
  misc_feature (761)..(761): n equals a,t,g, or c
gcgccactgtccggccncagcctaacgctcttcgctgtcgtttgcggtctcgcgcagggcggccccggttctggtgtttggcgtcggaattaaacaaccaccatgtcgagcaaaaaggcaaagaccaagaccaccaagaagcgccctcagcgtgcaacatccaatgtgtttgccatgtttgaccagtcacagattcaggagttcaaagaggccttcaacatgattgatcagaacagagatggcttcatcgacaaggaagatttgcatgatatgcttgcttctctagggaagaatcccactgatgcataccttgatgccatgatgaatgaggccccagggcccatcaatttcaccatgttcctgaccatgtttggtgagaagttaaatggcacagatcctgaagatgtcatcagaaacgcctttgcttgctttgatgaagaagcaacaggcaccattcaggaagattacctaagagagctgctgacaaccatgggggatcggtttacagatgaggaagtggatgagctgtacagagaagcacctattgacaaaaaggggaatttcaattacatcgagttcacacgcatnctgaaacatggagccnaagaccaagatgactgaaagaactttagctaaaatctttcagttacattggcttactctcttttacttctcagacactttccccacccttatagaactgtgcatgcaacttantttcacagctttgnctcttcttttgatgattattncaaacnttntgcacttaacacttgataatcag

SEQ ID NO: 2011 - DNA, 783 bp, Homo sapiens
  misc_feature (16)..(16): n equals a,t,g, or c
  misc_feature (631)..(631): n equals a,t,g, or c
  misc_feature (676)..(676): n equals a,t,g, or c
  misc_feature (690)..(690): n equals a,t,g, or c
  misc_feature (705)..(705): n equals a,t,g, or c
  misc_feature (708)..(708): n equals a,t,g, or c
  misc_feature (767)..(767): n equals a,t,g, or c
gcctgatcaagctcantaataagctgaaatatggccagactatcaggcccatttgtctcccctgcaccgagggaacaactcgagctttgaggcttcctccaactaccacttgccagcaacaaagtaagacatacttggcaagaggataaggatgagatcccaagagacaagtggggcatgagagggaggtgcaataggaagagatgatgcctggcccagaacctagctctagaagggcttaggggacatctactgagtgacaaaggcaatggggagatgacagtggtgggagcagctgaagtgacgcagtctattcgtccagaggaagagctgctccctgcacaggatatcaaagctctgtttgtgtctgaggaggagaaaaagctgactcggaaggaggtctacatcaagaatggggataagaaaggcagctgtgagagagatgctcaatatgccccaggctatgacaaagtcaaggacatctcagaggtggtcacccctcggttcctttgtactggaggagtgagtccctatgctgaccccaatacttgcagaggtgattctggcggccccttgatagttcacaagagaagtcgtttcattcaagttggtgtaatcagcttgggagtantggatgtctgcaaaaaccagaagcggcaaaagcaggtacctgctnacgcccgagatttnacatcaacctctttnagngctgcctgctgaagagaactccagatgaggaattggtttctataagggttctgtgacangctggatgaataaaca

SEQ ID NO: 2012 - DNA, 762 bp, Homo sapiens
  misc_feature (606)..(606): n equals a,t,g, or c
  misc_feature (645)..(645): n equals a,t,g, or c
  misc_feature (719)..(719): n equals a,t,g, or c
  misc_feature (727)..(727): n equals a,t,g, or c
  misc_feature (760)..(762): n equals a,t,g, or c
ggcaggggcccgagcggagccggccgcgatgagcggggagccggggcagacgtccgtagcgccccctcccgaggaggtcgagccgggcagtggggtccgcatcgtggtggagtactgtgaaccctgcggcttcgaggcgacctacctggagctggccagtgctgtgaaggagcagtatccgggcatcgagatcgagtcgcgcctcgggggcacaggtgcctttgagatagagataaatggacagctggtgttctccaagctggagaatgggggctttccctatgagaaagatctcattgaggccatccgaagagccagtaatggagaaaccctagaaaagatcaccaacagccgtcctccctgcgtcatcctgtgactgcacaggactctgggttcctgctctgttctggggtccaaaccttggtctccctttggtcctgctgggagctccccctgcctctttcccctacttagctccttagcaaagagaccctggcctccactttgccctttgggtacaaagaaggaatagaagattccgtggccttgggggcaggagagagacactcttcatgaacacttcttcagccacctcatacccccttnccaggtaaagtgcccacgaaagcccagtccactctttgnctcggtaatacctgtctgatgcccccagaattttatttaattcttccctaacccaagggcaaatgtcaagttanttggcaantaaaagtggggctttccaaccccttaaaaaaannn

SEQ ID NO: 2013 - DNA, 673 bp, Homo sapiens
  misc_feature (136)..(136): n equals a,t,g, or c
  misc_feature (176)..(176): n equals a,t,g, or c
  misc_feature (192)..(192): n equals a,t,g, or c
  misc_feature (195)..(195): n equals a,t,g, or c
  misc_feature (388)..(388): n equals a,t,g, or c
  misc_feature (466)..(466): n equals a,t,g, or c
  misc_feature (468)..(468): n equals a,t,g, or c
  misc_feature (513)..(514): n equals a,t,g, or c
  misc_feature (526)..(526): n equals a,t,g, or c
  misc_feature (610)..(610): n equals a,t,g, or c
  misc_feature (630)..(630): n equals a,t,g, or c
  misc_feature (646)..(648): n equals a,t,g, or c
gtggaaatgagtgttgagcaggaaattctggtgactggtatcaaggttgtcgatctgctagctccctatgccaagggtggcaaaattgggctttttggtggtgctggagttggcaagactgtactgatcatggagntaatcaacaatgtcgccaaagcccatggtggttactctgngtttgctggtgttggnganaggacccgtgaaggcaatgatttataccatgaaatgattgaatctggtgttatcaacttaaaagatgccacctctaaggtagcgctggtatatggtcaaatgaatgaaccacctggtgctcgtgcccgggtagctctgactgggctgactgtggctgaatacttcatagaccaagaaggtcaatatgtactgntatttattgataacatctttcgcttcacccaagctggttcaaaggtgctgcattattggcccaataccttctgctgangnctattaagctaccctggcccactgacatgggtactatgcaggaanngaattaccactncccagaaagggatctatcacctctggacaggctatctatgtgcctgctgatgacttgacttgaccctggcccctgctaataacntttgggccattttggaagcntaccactttacttgtnnncggggccaattgcttaaacttgggc

SEQ ID NO: 2014 - DNA, 790 bp, Homo sapiens
  misc_feature (1)..(1): n equals a,t,g, or c
  misc_feature (15)..(15): n equals a,t,g, or c
  misc_feature (18)..(19): n equals a,t,g, or c
  misc_feature (25)..(25): n equals a,t,g, or c
  misc_feature (591)..(591): n equals a,t,g, or c
  misc_feature (720)..(720): n equals a,t,g, or c
  misc_feature (735)..(735): n equals a,t,g, or c
  misc_feature (748)..(748): n equals a,t,g, or c
ncatttagggtctgntgnnacgccngcaggtaccggtccggaattcccgggtcgacccacgcgtccgggccccgcaggcaggactctgggacagacgcaggccagctgcccagagcccagaccaagcatggacgccgtggatgccaccatggagaaactccgggcacagtgcctgtcccgcggggcctcgggcatccagggcctggccaggtttttccgccaactagaccgggacgggagcagatccctggacgctgatgagttccggcagggtctggccaaactcgggctggtgctggaccaggcggaggcagagggtgtgtgcaggaagtgggaccgcaatggcagcgggacgctggatctggaggagttccttcgggcgctgcggccccccatgtcccaggcccgggaggctgtcatcgcagctgcatttgccaagctggaccgcagtggggacggcgtcgtgacggtggacgacctccgcggggtgtacaagtggccgtgcccaccccaaggtgcgcagtggggagtggaccgaggacgaagtgctgcgccgtttctggacaacttcgacttctctgaagaaggacnggcaaggtcacacttggcggaatttcaaggactactacagcggctgaagtgccttccatgaaccacggattaagaagttcgtgggccatgaataaccaatgcctggcaacttgtgaacaagcttccggnttaaaccctggttgnccttggcctgggnacttcccaacccttgccggaaaacttcctttctgggcccctt

SEQ ID NO: 2015 - DNA, 731 bp, Homo sapiens
  misc_feature (1)..(1): n equals a,t,g, or c
  misc_feature (7)..(7): n equals a,t,g, or c
  misc_feature (15)..(15): n equals a,t,g, or c
  misc_feature (21)..(21): n equals a,t,g, or c
  misc_feature (28)..(28): n equals a,t,g, or c
  misc_feature (705)..(705): n equals a,t,g, or c
  misc_feature (710)..(710): n equals a,t,g, or c
  misc_feature (712)..(712): n equals a,t,g, or c
  misc_feature (727)..(727): n equals a,t,g, or c
  misc_feature (730)..(730): n equals a,t,g, or c
ncgggtnatgctgtntcgccngcaggtnccggtccggaattcccgggtcgacccacgcgtccggccgccgagtcgcgcggaggcggaggcttgggtgcgttcaagattcagcttcacccgtaacccaccgccatggccgaggaaggcattgctgctggaggtgtaatggacgttaatactgctttacaagaggttctgaagactgccctcatccacgatggcctagcacgtggaattcgcgaagctgccaaagccttagacaagtacgtgtatcagtctcaatactgtgggttcttgcaaccggaacaaaactgccacccaagggaagaaggcatggagttcatggtgttagcgcaaaagttctgaatggcatccgtcctaccggaaacctaggaaaaggcgccaagcccatctttgtgtgcttgcatccaactgtgatgagcctatgtatgtcaagttggtggaggccctttgtgctgaacaccaaatcaacctaattaaggttgatgacaacaagaaactaggagaatgggtaggcctttgtaaaattgacagagaggggaaaccccgtaaagtggttggttgcaattgtgtagtaattaaggactatggcaaggagtctcaagccaaggatgtcattgaagagtatttcaaatgccagaaatgaagaaataaatcttttggctcacaaaaaaaaaaaaaaanggggngncccttttaaaagaanccna

SEQ ID NO: 2016 - DNA, 801 bp, Homo sapiens
  misc_feature (15)..(15): n equals a,t,g, or c
  misc_feature (22)..(22): n equals a,t,g, or c
  misc_feature (28)..(28): n equals a,t,g, or c
  misc_feature (75)..(75): n equals a,t,g, or c
  misc_feature (81)..(81): n equals a,t,g, or c
  misc_feature (682)..(682): n equals a,t,g, or c
  misc_feature (695)..(695): n equals a,t,g, or c
  misc_feature (741)..(741): n equals a,t,g, or c
  misc_feature (768)..(768): n equals a,t,g, or c
acccccatttaggtntggtgcnacgccngcaggtaccggtccggaattcccgggtcgacccacgcgtccgcccanatgaangagagaagtttaaacagatttctcaagcttacgaagttctctctgatgcaaagaaaagggaattatatgacaaaggaggagaacaggcaattaaagagggtggagcaggtggcggttttggctcccccatggacatctttgatatgttttttggaggaggaggaaggatgcagagagaaaggagaggtaaaaatgttgtacatcagctctcagtaaccctagaagacttatataatggtgcaacaagaaaactggctctgcaaaagaatgtgatttgtgacaaatgtgaaggtagaggaggtaagaaaggagcagtagagtgctgtcccaattgccgaggtactggaatgcaaataagaattcatcagataggacctggaatggttcagcaaattcagtctgtgtgcatggagtgccagggccatggggagcggatcagtcctaaagatagatgtaaaagctgcaacggaaggaagatagttcgagagaagaaaattttagaagttcatattgacaaaggcatgaaagatggccagaagataacattccatggtgaaggagaccaagaaccaggactggagccaggcgatattatcattgnggtagatcagaangaccatgctggttttactcgacgaaggagaagaccttttcatgtgnatggacatacagttcgttgaagcctgngtggcttcaaaaccatatctactcttgcaccga

SEQ ID NO: 2017 - DNA, 790 bp, Homo sapiens
  misc_feature (5)..(6): n equals a,t,g, or c
  misc_feature (8)..(8): n equals a,t,g, or c
  misc_feature (13)..(13): n equals a,t,g, or c
  misc_feature (17)..(17): n equals a,t,g, or c
  misc_feature (568)..(568): n equals a,t,g, or c
  misc_feature (663)..(663): n equals a,t,g, or c
  misc_feature (669)..(669): n equals a,t,g, or c
  misc_feature (696)..(696): n equals a,t,g, or c
  misc_feature (729)..(729): n equals a,t,g, or c
  misc_feature (749)..(749): n equals a,t,g, or c
  misc_feature (766)..(766): n equals a,t,g, or c
  misc_feature (775)..(775): n equals a,t,g, or c
tcatnntngggtnatgntcctacgcctgcaggtaccggtccggaattcccgggtcgacccacgcgtccgcgcacgcacacacacatacagagctctctgagggtgatggggctgagcaggaggggggctgggtaagagcacaggttagggcatggaaggcttctccgcccattctgacccagggcctaggacggataggcaggaacatacagacacatttacactagaggccagggatagaggatattgggtctcagccctaggggaatgggaagcagctcaagggaccctgggtgggagcataggaggggtctggacatgtggttactagtacaggttttgccctgattaaaaaatctcccaaagccccaaattcctgttagccaggtggaggcttctgatacgtgtatgagactatgcaaaagtacaagggctgagattcttcgtgtatagctgtgtgaacgtgtatgtacctaggatatgttaaatgtatagatggcaccttagttgcatgaccacatagaacatgtgtctatctgcttttgcctacgtgacaacacaaatttgngagggtgagacactgcacagaatacagcagcaagtgtgctggcctctctgacatatgctaacccccaaatactctgaatttggagtctgactgtncccaantgggtccaagtggctgtgacatctacntatggcttcacaccttcaatgctggctgggagncagggtgagagtcttgggtncaggcctggcatgtggnccttcatgnatgaaaaggcccttg

SEQ ID NO: 2018 - DNA, 767 bp, Homo sapiens
  misc_feature (5)..(5): n equals a,t,g, or c
  misc_feature (14)..(14): n equals a,t,g, or c
  misc_feature (19)..(19): n equals a,t,g, or c
  misc_feature (31)..(31): n equals a,t,g, or c
  misc_feature (76)..(76): n equals a,t,g, or c
  misc_feature (187)..(187): n equals a,t,g, or c
  misc_feature (680)..(680): n equals a,t,g, or c
  misc_feature (711)..(711): n equals a,t,g, or c
  misc_feature (722)..(722): n equals a,t,g, or c
  misc_feature (742)..(742): n equals a,t,g, or c
  misc_feature (767)..(767): n equals a,t,g, or c
tagantgggcgcgncggangctcgcaggtancggtccggaattcccgggtcgacccacgcgtccgcgacattccanaaaatgtcgacattactctgaagggacgcacagttatcgtgaagggccccagaggaaccctgcggagggacttcaatcacatcaatgtagaactcagccttcttggaaagnaaaaaaagaggctccgggttgacaaatggtggggtaacagaaaggaactggctaccgttcggactatttgtagtcatgtacagaacatgatcaagggtgttacactgggcttccgttacaagatgaggtctgtgtatgctcacttccccatcaacgttgttatccaggagaatgggtctcttgttgaaatccgaaatttcttgggtgaaaaatacatccgcagggttcggatgagaccaggtgttgcttgttcagtatctcaagcccagaaagatgaattaatccttgaaggaaatgacattgagcttgtttcaaattcagcggctttgattcagcaagccacaacagttaaaaacaaggatatcaggaaatttttggatggtatctatgtctctgaaaaaggaactgttcagcaggctgatgaataagatctaagaattacctgctacagaaagaagatgccagatgacacttaagaacctacttgtgatanttaaatgatgcaattaaaaagaactattganttggaaccttnttcttaaaaaaaaaaaaaanggggggccctttttaaagatcccan

SEQ ID NO: 2019 - DNA, 731 bp, Homo sapiens
  misc_feature (18)..(19): n equals a,t,g, or c
  misc_feature (337)..(337): n equals a,t,g, or c
  misc_feature (368)..(368): n equals a,t,g, or c
  misc_feature (428)..(428): n equals a,t,g, or c
  misc_feature (437)..(437): n equals a,t,g, or c
  misc_feature (443)..(443): n equals a,t,g, or c
  misc_feature (482)..(482): n equals a,t,g, or c
  misc_feature (504)..(504): n equals a,t,g, or c
  misc_feature (535)..(535): n equals a,t,g, or c
  misc_feature (579)..(579): n equals a,t,g, or c
  misc_feature (595)..(595): n equals a,t,g, or c
  misc_feature (608)..(608): n equals a,t,g, or c
  misc_feature (613)..(613): n equals a,t,g, or c
  misc_feature (620)..(620): n equals a,t,g, or c
  misc_feature (631)..(631): n equals a,t,g, or c
  misc_feature (687)..(687): n equals a,t,g, or c
  misc_feature (701)..(701): n equals a,t,g, or c
  misc_feature (703)..(703): n equals a,t,g, or c
  misc_feature (705)..(705): n equals a,t,g, or c
  misc_feature (710)..(710): n equals a,t,g, or c
gctgatgcccccatgttnntcatgggtgtgaaccatgagaagtatgacaacagcctcaagatcatcagcaatgcctcctgcaccaccaactgcttagcacccctggccaaggtcatccatgacaactttggtatcgtggaaggactcatgaccacagtccatgccatcactgccacccagaagactgtggatggcccctccgggaaactgtggcgtgatggccgcggggctctccagaacatcatccctgcctctactggcgctgccaaggctgtgggcaaggtcatccctgagctgaacgggaagctcactggcatggccttccgtgtcccactgncaacgtgtcagtggtggacctgacctggcgnctagaaaaacctgccaaatatgatgacatcaagaaagtggtgaaacaagcgtcggaaggnccccttaanggcatnctgggctacactggagcaccaaggggggcctcctctgancttcaacaggggacaacccaanttccttcaacctttgacgcttggggcttggnaattggcccttaacgaacaacttttggcaaagcttaatttcccngggatgacaaccaaanttgggttacaggnaacanggtgggnggaaccttaangggccaaaatgggccttccaagggagtaagaaaccctgggaccaccaagcccccancaaggaagcccccngnanggaanaaaaagaagacccttaaattg

SEQ ID NO: 2020 - DNA, 792 bp, Homo sapiens
  misc_feature (4)..(4): n equals a,t,g, or c
  misc_feature (11)..(11): n equals a,t,g, or c
  misc_feature (18)..(18): n equals a,t,g, or c
  misc_feature (25)..(25): n equals a,t,g, or c
  misc_feature (32)..(32): n equals a,t,g, or c
  misc_feature (627)..(627): n equals a,t,g, or c
  misc_feature (724)..(724): n equals a,t,g, or c
  misc_feature (743)..(743): n equals a,t,g, or c
  misc_feature (745)..(745): n equals a,t,g, or c
accnttcactntagggtnatgctgntacgccngcaggtaccggtccggaattcccgggtcgacccacgcgtccgcggcgtgagaagccatgagcagcaaagtctctcgcgacaccctgtacgaggcggtgcgggaagtcctgcacgggaaccagcgcaagcgccgcaagttcctggagacggtggagttgcagatcagcttgaagaactatgatccccagaaggacaagcgcttctcgggcaccgtcaggcttaagtccactccccgccctaagttctctgtgtgtgtcctgggggaccagcagcactgtgacgaggctaaggccgtggatatcccccacatggacatcgaggcgctgaaaaaactcaacaagaataaaaaactggtcaagaagctggccaagaagtatgatgcgtttttggcctcagagtctctgatcaagcagattccacgaatcctcggcccaggtttaaataaggcaggaaagttcccttccctgctcacacacaacgaaaacatggtggccaaagtggatgaggtgaagtccacaatcaagttccaaatgaagaaggtgttatgtctggctgtagctgttggtcacgtgaagatgacagacgatgagcttgngtataacattcacctggctgtcaacttcttggtgtcattgctcaagaaaaactggcagaatgtccgggccttatatatcaagagcaccatgggcaanccccagcgcctatattaangnacatttgaataaattctattaccagttaaaaaaaaaaaaaaaaaagg

SEQ ID NO: 2021 - DNA, 430 bp, Homo sapiens
  misc_feature (15)..(15): n equals a,t,g, or c
  misc_feature (96)..(96): n equals a,t,g, or c
  misc_feature (163)..(164): n equals a,t,g, or c
  misc_feature (175)..(175): n equals a,t,g, or c
  misc_feature (208)..(208): n equals a,t,g, or c
  misc_feature (210)..(210): n equals a,t,g, or c
  misc_feature (216)..(216): n equals a,t,g, or c
  misc_feature (226)..(226): n equals a,t,g, or c
  misc_feature (231)..(231): n equals a,t,g, or c
  misc_feature (243)..(243): n equals a,t,g, or c
  misc_feature (254)..(255): n equals a,t,g, or c
  misc_feature (261)..(261): n equals a,t,g, or c
  misc_feature (267)..(267): n equals a,t,g, or c
  misc_feature (285)..(285): n equals a,t,g, or c
  misc_feature (378)..(379): n equals a,t,g, or c
  misc_feature (393)..(393): n equals a,t,g, or c
  misc_feature (415)..(415): n equals a,t,g, or c
  misc_feature (421)..(421): n equals a,t,g, or c
ggccggagaccagcntacagccgcctgcatctgtatccagcgccaggtcccgccagtcccagctgcgcgcgccccccagtcccgcacccgttcggnccaggctaagttagccctcaccatgccggtcaaaggaggcaccaagtgcatcaaatacctgctgttnngatttaacttnatcttctgggagtctatattctgatcggagccngngccctnatgatgctgntgggnttactgggctgntgcggtgctgnncaggantcccantgcatgctgggactgttnttcggcttccttttgggagatattcgccattgaaatagctgtggcatctggagatattcccacaaggatgacgtgattaaggaagttcagganntttacaaggacacntacaacaagcttgaaaaccaangatganccccagagg

SEQ ID NO: 2022 - DNA, 514 bp, Homo sapiens
  misc_feature (25)..(25): n equals a,t,g, or c
  misc_feature (38)..(38): n equals a,t,g, or c
  misc_feature (54)..(54): n equals a,t,g, or c
  misc_feature (61)..(62): n equals a,t,g, or c
  misc_feature (71)..(72): n equals a,t,g, or c
  misc_feature (93)..(93): n equals a,t,g, or c
  misc_feature (119)..(119): n equals a,t,g, or c
  misc_feature (122)..(122): n equals a,t,g, or c
  misc_feature (145)..(145): n equals a,t,g, or c
  misc_feature (153)..(153): n equals a,t,g, or c
  misc_feature (176)..(176): n equals a,t,g, or c
  misc_feature (189)..(189): n equals a,t,g, or c
  misc_feature (212)..(212): n equals a,t,g, or c
  misc_feature (223)..(223): n equals a,t,g, or c
  misc_feature (270)..(270): n equals a,t,g, or c
  misc_feature (294)..(294): n equals a,t,g, or c
  misc_feature (303)..(303): n equals a,t,g, or c
  misc_feature (330)..(330): n equals a,t,g, or c
  misc_feature (399)..(399): n equals a,t,g, or c
  misc_feature (427)..(427): n equals a,t,g, or c
  misc_feature (438)..(438): n equals a,t,g, or c
  misc_feature (454)..(454): n equals a,t,g, or c
  misc_feature (494)..(494): n equals a,t,g, or c
  misc_feature (506)..(506): n equals a,t,g, or c
gatttcatctggatgtacgaagatnatctctcaggagntctaattcttgccagngaactgnngaggctggnnggcaacagctgtgactgctgnagactactcccgaccccttacatctncancttcatcaatgagctggattccngttatcgncttctcaacctgaaaaatgactncctgaggaagcgntacgacggattgaaatatgacgngaagaaagtanaggaagtggtctatgatctctacatccggggctttaataaggagacngcagcagcttgtgttgaaaaatangaggctctncttgctcctggccttgctgacctcagnggttgccatgaaggggtgagcacagagtgcctcttacggtaattaggatgctcagttgctaaacactgngctttattttcttaaccagttgtggtgngagtatcaganttgaaacacttttttncgggtaaaaaatatatcctttacatggacagaatttattntgacgcttcagngaatatgc

SEQ ID NO: 2023 - DNA, 766 bp, Homo sapiens
  misc_feature (574)..(574): n equals a,t,g, or c
  misc_feature (609)..(609): n equals a,t,g, or c
  misc_feature (654)..(654): n equals a,t,g, or c
  misc_feature (674)..(674): n equals a,t,g, or c
  misc_feature (733)..(733): n equals a,t,g, or c
  misc_feature (762)..(762): n equals a,t,g, or c
ggcagaggggtccatacggcgttgttctggattcccgtcgtaacttaaagggaaattttcacaatgtccggagcccttgatgtcctgcaaatgaaggaggaggatgtccttaagttccttgcagcaggaacccacttaggtggcaccaatcttgacttccagatggaacagtacatctataaaaggaaaagtgatggcatctatatcataaatctcaagaggacctgggagaagcttctgctggcagctcgtgcaattgttgccattgaaaaccctgctgatgtcagtgttatatcctccaggaatactggccagagggctgtgctgaagtttgctgctgccactggagccactccaattgctggccgcttcactcctggaaccttcactaaccagatccaggcagccttccgggagccacggcttcttgtggttactgaccccagggctgaccaccagcctctcacggaggcatcttatgttaacctacctaccattgcgctgtgtaacacagattctcctctgcgctatgtggacattgccatcccatgcaacaacaagggagctcactcantgggtttgatgtggtggatgctggctcgggaaagntctgcgcatgcgtggcaccattttcccgggaacacccattgggangtcattgcctgaactggacnttttacagagatcctgaagaagaattgaaaaagaagaagcaggcttgttgcttaaaaangcaatgacccaaggaggaatttaaggtgnaatg

SEQ ID NO: 2024 - DNA, 749 bp, Homo sapiens
  misc_feature (597)..(597): n equals a,t,g, or c
  misc_feature (618)..(618): n equals a,t,g, or c
  misc_feature (627)..(627): n equals a,t,g, or c
  misc_feature (681)..(681): n equals a,t,g, or c
  misc_feature (715)..(715): n equals a,t,g, or c
  misc_feature (737)..(737): n equals a,t,g, or c
  misc_feature (743)..(743): n equals a,t,g, or c
  misc_feature (746)..(746): n equals a,t,g, or c
gcctgaccgagacctgggccggctcccactccatgaggtatttctccacatccgtgtcctggcccggccgcggggagccccgcttcatcgcagtgggctacgtggacgacacgcagttcgtgcggttcgacagcgacgccgcgagtccaagaggggagccgcgggagccgtgggtggagcaggaggggccggagtattgggaccgggagacacagaagtacaagcgccaggcacaggctgaccgagtgaacctgcggaaactgcgcggctactacaaccagagcgaggacgggtctcacaccctccagaggatgtttggctgcgacctggggccggacgggcgcctcctccgcgggtataaccagttcgcctacgacggcaaggattacatcgccctgaacgaggatctgcgctcctggaccgccgcggacacggcggctcagatcacccagcgcaagtgggaggcggcccgtgaggcggagcagcggagagcctacctggagggcacgtgcgtggagtggcttcgcagatacctggagaacgggaaggagacgctgcagcgcgcggaacacccaaagacacacgtgacccaccatnccgtctcttgaccatgaaggncaccctgangtgcttgggcccttggctttctacccttgcggagaatcacacttgacttggcanttggggatggggaaggacccaaacttaaggaaanccgaactttgtgggaaaaccanggccancangga

SEQ ID NO: 2025 - DNA, 588 bp, Homo sapiens
  misc_feature (411)..(411): n equals a,t,g, or c
  misc_feature (480)..(480): n equals a,t,g, or c
  misc_feature (510)..(510): n equals a,t,g, or c
  misc_feature (518)..(518): n equals a,t,g, or c
  misc_feature (555)..(555): n equals a,t,g, or c
  misc_feature (567)..(567): n equals a,t,g, or c
  misc_feature (569)..(569): n equals a,t,g, or c
gtgtagatcgctgagcgatactttcggcagcacctccttgattctcagttttgctggaggccgcaaccaggcccgcgccgccaccatgtttcgaaatcagtatgacaatgatgtcactgtttggagcccccagggcaggattcatcaaattgaatatgcaatggaagctgttaaacaaggttcagccacagttggtctgaaatcaaaaactcatgcagttttggttgcattgaaaagggcgcaatcagagcttgcagctcatcagaaaaaaattctccatgttgacaaccatattggtatctcaattgcggggcttactgctgatgctagactgttatgtaattttatgcgtcaggagtgtttggattccagatttgtattcgatagaccactgcctgtgtctcgtcttgnatctctaattggaagcaagacccagataccaacacaacgatatggccggagaccatatggtgttggctncttattgtgggtatgatgatatgggccctnacattttncaaacctgtccatctgctaactattttgactgcagancatgtcattggnanccgttccaatcagttcgac

SEQ ID NO: 2026 - DNA, 821 bp, Homo sapiens
  misc_feature (67)..(67): n equals a,t,g, or c
  misc_feature (243)..(243): n equals a,t,g, or c
  misc_feature (265)..(265): n equals a,t,g, or c
  misc_feature (275)..(275): n equals a,t,g, or c
  misc_feature (309)..(309): n equals a,t,g, or c
  misc_feature (313)..(313): n equals a,t,g, or c
  misc_feature (328)..(328): n equals a,t,g, or c
  misc_feature (339)..(339): n equals a,t,g, or c
  misc_feature (368)..(368): n equals a,t,g, or c
  misc_feature (372)..(372): n equals a,t,g, or c
  misc_feature (399)..(399): n equals a,t,g, or c
  misc_feature (407)..(407): n equals a,t,g, or c
  misc_feature (431)..(431): n equals a,t,g, or c
  misc_feature (437)..(437): n equals a,t,g, or c
  misc_feature (452)..(452): n equals a,t,g, or c
  misc_feature (481)..(481): n equals a,t,g, or c
  misc_feature (497)..(497): n equals a,t,g, or c
  misc_feature (522)..(522): n equals a,t,g, or c
  misc_feature (525)..(525): n equals a,t,g, or c
  misc_feature (538)..(538): n equals a,t,g, or c
  misc_feature (552)..(552): n equals a,t,g, or c
  misc_feature (590)..(590): n equals a,t,g, or c
  misc_feature (610)..(610): n equals a,t,g, or c
  misc_feature (617)..(617): n equals a,t,g, or c
  misc_feature (621)..(621): n equals a,t,g, or c
  misc_feature (629)..(629): n equals a,t,g, or c
  misc_feature (644)..(644): n equals a,t,g, or c
  misc_feature (683)..(683): n equals a,t,g, or c
  misc_feature (688)..(688): n equals a,t,g, or c
  misc_feature (722)..(722): n equals a,t,g, or c
  misc_feature (727)..(727): n equals a,t,g, or c
  misc_feature (730)..(730): n equals a,t,g, or c
  misc_feature (736)..(737): n equals a,t,g, or c
  misc_feature (763)..(763): n equals a,t,g, or c
  misc_feature (770)..(770): n equals a,t,g, or c
  misc_feature (773)..(773): n equals a,t,g, or c
  misc_feature (792)..(792): n equals a,t,g, or c
  misc_feature (808)..(808): n equals a,t,g, or c
  misc_feature (810)..(810): n equals a,t,g, or c
tttaggtttagctggcacgcctgcaggtaccggtccggaattcccgggtcgacccacgcgtccggtngatttagggtgaccacggggcccgggtggtactggtggccgtggacaagggcgtgttcgtgctgaataagaagaacaaactgacgcagagtaagatctgggacgtggtggagaaggcagacatcggctgcaccccgggcagtgggaaggattacgccggtgtcttctccgacgcanggctgaccttcacgagcagcantggccagcanaccgcccatagggcagaacttcagtgcccgcagncagncgcccgtcgacgccnttccgtgcagntcacggagaagcgaatggacaaagtcggnaagnaccccaaggagctgcgcaagtgctgcnaggacggnatgcgggagaaccccatgaggttntcgtgncagcgccggacccgnttcatctccctgggcgaggcgtgcaaganggtcttcctggactgntgcaactacatcacagagctgcggnggnaagcacgcgcggnccagtcacctgggnctgggcaggagttacctggatgaagacatcattgacangaaaacatcgtttcccgaantgaggtnccanagagctgncttgtggaaccgttnaaggacttgaaaagagccaccgaaaaattgggaatcttntaccnaaagcttaatggaatatatttttttgaaaggacnttcanttnaccaannttggggaagaaatttttggccttggnaaaacantgntccgggaccaaagaaaaanggggaaaccttgttgntngggcaaaaaaa

SEQ ID NO: 2027 - DNA, 685 bp, Homo sapiens
  misc_feature (634)..(634): n equals a,t,g, or c
  misc_feature (661)..(661): n equals a,t,g, or c
  misc_feature (667)..(668): n equals a,t,g, or c
  misc_feature (685)..(685): n equals a,t,g, or c
gcagaactgaaattcgaatggcgaggatggcaagaaaagctggcaacttctatgtacctgcagaacccaaattggcgtttgtcatcagaatcagaggtatcaatggagtgagcccaaaggttcgaaaggtgttgcagcttcttcgctttcgtcaaatcttcaatggaacctttgtgaagctcaacaaggcttcgattaacatgctgaggattgtagagccatatattgcatgggggtaccccaatctgaagtcagtaaatgaactaatctacaagcgtggttatggcaaaatcaataagaagcgaattgctttgacagataacgctttgattgctcgatctcttggtaaatacggcatcatctgcatggaggatttgattcatgagatctatactgttggaaaacgcttcaaagaggcaaataacttcctgtggcccttcaaattgtcttctccacgaggtggaatgaagaaaaagaccacccattttgtagaaggtggagatgctggcaacagggaggaccagatcaacaggcttattagaagaatgaactaaggtgtctaccatgattatttttctaactggtggttaataaacagtacctgctctcaaattgaaaaaaaaaaaaaaaaaangggcggccctttttaaaaggatccaantttacnnacccggcattccaaagn

SEQ ID NO: 2028 - DNA, 748 bp, Homo sapiens
  misc_feature (17)..(17): n equals a,t,g, or c
  misc_feature (52)..(52): n equals a,t,g, or c
  misc_feature (340)..(340): n equals a,t,g, or c
  misc_feature (414)..(414): n equals a,t,g, or c
  misc_feature (614)..(614): n equals a,t,g, or c
  misc_feature (639)..(639): n equals a,t,g, or c
  misc_feature (691)..(691): n equals a,t,g, or c
  misc_feature (746)..(746): n equals a,t,g, or c
ggaaaagcatcagaaangcttttgtactttgtggtttcctctattttgaatnttttgatcaaaaaactgattagcagaatatagtttggagtttggcttcatcttcctggggttcccctcactcccttttttgtcaaccccatctgtagcctcttcctctactcaggcagtcgacccgccacgatgagaagtgggaccagcagagggcgccaacttcaggagtccgctttcccaccaggcttcattcacccagtggacctgaactgtttggtagagccacccggcccttccttcctcatcgatgtttggtatgcgcacagttcctgtgggactgggccgngagttttccattggaaagaagttcagtggtcccattgttaactcagcctcaaatctcaactgtcaggccctacnaagaaaatggagagcctcttctggtggatgctttgctccctctgagctgccatgctggtctggcaaacacacctttctgctttgccttacaaaagtaatgagttccctttcccaccccttgcctgaccctcaaggagtcagcctgcttccatccatgggtgggaagacttcagcacaaaggaaagactaattcttgtcangcatttttgaaaaggctgattatgnggatcaaaggtaccagcatcgtaagggtcccctaaaacttggccctggtttnggtttttttaaggttcggtaatcccccttactggaccggggcctcttactaaggngg

SEQ ID NO: 2029 - DNA, 690 bp, Homo sapiens
  misc_feature (2)..(2): n equals a,t,g, or c
  misc_feature (5)..(5): n equals a,t,g, or c
  misc_feature (7)..(7): n equals a,t,g, or c
  misc_feature (9)..(9): n equals a,t,g, or c
  misc_feature (17)..(17): n equals a,t,g, or c
  misc_feature (483)..(483): n equals a,t,g, or c
  misc_feature (632)..(632): n equals a,t,g, or c
  misc_feature (660)..(660): n equals a,t,g, or c
  misc_feature (670)..(670): n equals a,t,g, or c
  misc_feature (674)..(674): n equals a,t,g, or c
  misc_feature (682)..(682): n equals a,t,g, or c
anacncntnatggggcncttgcgggtaccggtccggaattcccgggtcgacccacgcgtccggtccagctcaaccggcccaacaagaggaatgccatgaacaaggtcttctggagagagatggtagagtgcttcaacaagatttcgagagacgctgactgtcgggcggtggtgatctctggtgcaggaaaaatgttcactgcaggtattgacctgatggacatggcttcggacatcctgcagcccaaaggagatgatgtggcccggatcagctggtacctccgtgacatcatcactcgataccaggagaccttcaacgtcatcgagaggtgccccaagcccgtgattgctgccgtccatgggggctgcattggcggaggtgtggaccttgtcaccgcctgtgacatccggtactgtgcccaggatgctttcttccaggtgaaggaggtggacgtgggtttggctgccgatgtaggaacactgnagcgcctgcccaaggtcatcgggaaccagagcctggtcaacgagctggccttcaccggccgcaagatgatggctgacgaggccctgggcagtgggctggtcagcccgggtgttcccagacaaagaggtcatgctggatgcttgccttancgctggcggcccgaaaattttcagcaangagccccgtnggcnggtgccanaacaccaa

SEQ ID NO: 2030 - DNA, 551 bp, Homo sapiens
  misc_feature (5)..(5): n equals a,t,g, or c
  misc_feature (18)..(18): n equals a,t,g, or c
  misc_feature (32)..(32): n equals a,t,g, or c
  misc_feature (37)..(37): n equals a,t,g, or c
  misc_feature (40)..(40): n equals a,t,g, or c
  misc_feature (125)..(125): n equals a,t,g, or c
  misc_feature (174)..(174): n equals a,t,g, or c
  misc_feature (243)..(243): n equals a,t,g, or c
  misc_feature (252)..(252): n equals a,t,g, or c
  misc_feature (276)..(276): n equals a,t,g, or c
  misc_feature (289)..(289): n equals a,t,g, or c
  misc_feature (309)..(309): n equals a,t,g, or c
  misc_feature (344)..(344): n equals a,t,g, or c
  misc_feature (360)..(360): n equals a,t,g, or c
  misc_feature (372)..(372): n equals a,t,g, or c
  misc_feature (396)..(396): n equals a,t,g, or c
  misc_feature (405)..(405): n equals a,t,g, or c
  misc_feature (421)..(421): n equals a,t,g, or c
  misc_feature (431)..(431): n equals a,t,g, or c
  misc_feature (434)..(434): n equals a,t,g, or c
  misc_feature (436)..(436): n equals a,t,g, or c
  misc_feature (470)..(470): n equals a,t,g, or c
  misc_feature (492)..(492): n equals a,t,g, or c
  misc_feature (531)..(531): n equals a,t,g, or c
  misc_feature (533)..(533): n equals a,t,g, or c
  misc_feature (544)..(544): n equals a,t,g, or c
cactntgacgagaccgtnaataggtacaagcnatccnggnacatctccaccctcaacagtggcaagaagagcctggagactgaacacaaggccttgaccagtgagattgcactgctgcagtccangctgaagacagagggctctgatctgtgcgacagagtgagcgaaatgcanaagctggatgcacaggttaaggagctggtgctgaagtcggcggtggaggctgagcgcctggtggctggnaagctcaanaaagacacgtacattgagaatganaagctcatctcangaaagctgccaggagctggncaccaagatcgaccacatcctggatgccctgtagnccctgcccggatcctncagggggcccanggtgcctgcactttgctgtggcangcagattgngtggtagtgggaggtngtgcatggangcnantgaaagctgacatctgtaaaaggccttcaaggangagaaaccaggccctgcgtcangcactgtgagattgccggttgtccttaactttctttaangntatttttaaantgggaaa

SEQ ID NO: 2031 - DNA, 527 bp, Homo sapiens
  misc_feature (17)..(17): n equals a,t,g, or c
  misc_feature (491)..(491): n equals a,t,g, or c
  misc_feature (511)..(511): n equals a,t,g, or c
  misc_feature (519)..(519): n equals a,t,g, or c
  misc_feature (522)..(522): n equals a,t,g, or c
  misc_feature (527)..(527): n equals a,t,g, or c
gggcacgcgctgggcanaaaggctaccatcaccgcactgagatcaacaagaagatttataagattggccagggctaccttatcaaggacggcaagctgatcaagaacaatgcctccactgactatgacctatctgacaagagcatcaaccctctgggtggctttgtccactatggtgaagtgaccaatgactttgtcatgctgaaaggctgtgtggtgggaaccaagaagcgggtgctcaccctccgcaagtccttgctggtgcagacgaagcggcgggctctggagaagattgaccttaagttcattgacaccacctccaagtttggccatggccgcttccagaccatggaggagaagaaagcattcatgggaccactgaagaaagaccgaattgcaaggaagaaggagcttaatgccaggaacagattttgcagttggtggggtctcaataaaagttattttccactgaaaaaaaaaaaaaaaaggggnggccgttttaaaggatccangtttacgnacncgtgn

SEQ ID NO: 2032 - DNA, 703 bp, Homo sapiens
  misc_feature (547)..(547): n equals a,t,g, or c
  misc_feature (560)..(560): n equals a,t,g, or c
  misc_feature (634)..(634): n equals a,t,g, or c
  misc_feature (666)..(666): n equals a,t,g, or c
  misc_feature (688)..(688): n equals a,t,g, or c
  misc_feature (697)..(697): n equals a,t,g, or c
ggctggcgtggggctgcttagatgcgccacggtttcggtagcgacggtagctctagccgggcctgagctgtgctagcacctcccccaggagaccgttgcagtcggccagcccccttctccacggtaaccatgtgcgaccgaaaggccgtgatcaaaaatgcggacatgtcggaagagatgcaacaggactcggtggagtgcgctactcaggcgctggagaaatacaacatagagaaggacattgcggctcatatcaagaaggaatttgacaagaagtacaatcccacctggcattgcatcgtggggaggaacttcggtagttatgtgacacatgaaaccaaacacttcatctacttctacctgggccaagtggcattcttctgttcaaatctggttaaaagcatggactgtgccacacacccagtgatccatccaaaaacaaggactgcagcctaaattccaaataccagagactgaaattttcagccttgctaagggaacatctcgatgtttgaacctttgtgggtttgtacaaggcattctctgnactagtttggcgngggtataaaacaattagcagaatagcctacatttggattaatttctattcatactttttgccacgtggtttctnttaaaatccattccttaaaaaataaattgaancagatgtgaaaaaaaaaaaaangggggcccnttaaag

SEQ ID NO: 2033 - DNA, 607 bp, Homo sapiens
  misc_feature (430)..(430): n equals a,t,g, or c
  misc_feature (554)..(554): n equals a,t,g, or c
  misc_feature (559)..(559): n equals a,t,g, or c
  misc_feature (563)..(563): n equals a,t,g, or c
  misc_feature (587)..(587): n equals a,t,g, or c
  misc_feature (604)..(604): n equals a,t,g, or c
gcgggcacttttcctcagagtttctgccttgcgctggtccaggagccattttgcaccaaggacttggtaggcagaggcagccccactgtaaagaagggtcagattaaaacaaaaaactgccaaaagcatcccctctgccccccatgtggcactggcatcattctctgcttccctgggaggaattttttcaccatgttattgaaggggatggttcattaaggactccacccctcagagctcactcgtgtccccagggacttctaaagcttggggctccaggaaatcatccagtagagttggagattcagagatttcttgaagccagggacatgctcctaactcctttcccattaaaggtgttagaatagaccagagggtgtcccttttccacagtaatgggatcggctggtgtgccttcagggaggaaganggaggtggtcaagcttgaaaaactggctttaggatggtctgactttggtctccttcccaagggtctcaaccttcattctgcaatgtcaaaagtttaaggaaagggttgggtgcccacattcagnggtgngggnttaaccatgtgaagtgaaaacttntgggttgttgaaacaanttt

SEQ ID NO: 2034 - DNA, 590 bp, Homo sapiens
  misc_feature (11)..(11): n equals a,t,g, or c
  misc_feature (292)..(292): n equals a,t,g, or c
  misc_feature (413)..(413): n equals a,t,g, or c
  misc_feature (477)..(477): n equals a,t,g, or c
  misc_feature (486)..(486): n equals a,t,g, or c
  misc_feature (504)..(504): n equals a,t,g, or c
  misc_feature (530)..(530): n equals a,t,g, or c
  misc_feature (533)..(533): n equals a,t,g, or c
  misc_feature (543)..(543): n equals a,t,g, or c
  misc_feature (578)..(578): n equals a,t,g, or c
gcttcatattnatgcttcctacagcatctcccagaaactgaatgttccaatggccccactctcagagccgaatgccgtaggcattgtcattgctcatggtagcgtgggggatgccatctcagtgatggttccagatgtgtacatctcagatgatgggggttactcctggacaaagatgctggaaggaccccactattacaccatcctggattctggaggcatcattgtggccattgagcacagcagccgtcctatcaatgtgattaagttctccacagacaaaggtcaatgntggcaaacctacacgttcaccagggaccccatctatttcactggcctagcttcagaacctggagctagggccatgaatatcagcatttggggcttcacagaatctttcctgaccagccagnggggtctcctacccattgattttaaagatatccttgaaaggaactgtgaaaaagaaggactatnccatatggnttggcacacttccacaanaccctgaaaaatttttaaaaaagggntgnattttggggntacaaaaaaaaaattttttgggggttacccaaggnaatcccggggtg

SEQ ID NO: 2035 - DNA, 559 bp, Homo sapiens
  misc_feature (1)..(1): n equals a,t,g, or c
  misc_feature (4)..(4): n equals a,t,g, or c
  misc_feature (13)..(13): n equals a,t,g, or c
  misc_feature (18)..(18): n equals a,t,g, or c
  misc_feature (29)..(30): n equals a,t,g, or c
  misc_feature (559)..(559): n equals a,t,g, or c
naanggaaatgcncatcncgaaatttggnngcctgcacgtaccggtccggaattcccgggtcgacccacgcgtccgctttcccagcgatgggcgtgcagccccccaacttctcctgggtgcttccgggccggctggcgggactggcgctgccgcggctccccgcccactaccagttcctgttggacctgggcgtgcggcacctggtgtccctgacggagcgcgggccccctcacagcgacagctgccccggcctcaccctgcaccgcctgcgcatccccgacttctgcccgccggcccccgaccagatcgaccgcttcgtgcagatcgtggacgaggccaacgcacggggagaggctgtgggagtgcactgtgctctgggctttggccgcactggcaccatgctggcctgttacctggtgaaggagcggggcttggctgcaggagatgccattgctgaaatccgacgactacgacccggctccatcgagacctatgagcaggagaaagcagtcttccagttctaccagcgaacgaaataaggggccccccttttttttn

SEQ ID NO: 2036 - DNA, 504 bp, Homo sapiens
  misc_feature (436)..(436): n equals a,t,g, or c
  misc_feature (471)..(471): n equals a,t,g, or c
  misc_feature (481)..(481): n equals a,t,g, or c
  misc_feature (492)..(492): n equals a,t,g, or c
  misc_feature (499)..(499): n equals a,t,g, or c
gcggacgcgtgggcggacgcgtggggttccgctatcttctttttcttcagcgaggcggccgagctggttggtggcggcggtcgtgcggacgcaaacatgcagatctttgtgaagaccctcactggcaaaaccatcacccttgaggtcgagcccagtgacaccattgagaatgtcaaagccaaaattcaagacaaggagggtatcccacctgaccagcagcgtctgatatttgccggcaaacagctggaggatggccgcactctctcagactacaacatccagaaagagtccaccctgcacctggtgttgcgcctgcgaggtggcattattgagccttctctccgccagcttgcccagaaatacaactgcgacaagatgatctgccgcaagtgctatgctcgcttaccctcgtgctgtcaactgccgcaagaagaantgtggtcacaccaacaacctgcgtccaagaagaangtcaaataanggtggtctttncttgaanggcaa

SEQ ID NO: 2037 - DNA, 541 bp, Homo sapiens
  misc_feature (388)..(388): n equals a,t,g, or c
  misc_feature (443)..(443): n equals a,t,g, or c
  misc_feature (447)..(447): n equals a,t,g, or c
  misc_feature (481)..(481): n equals a,t,g, or c
  misc_feature (538)..(539): n equals a,t,g, or c
gaacggaggcaggttggagccgctgccgtcgccatgacccgcggtaaccagcgtgagctcgcccgccagaagaatatgaaaaagcagagcgactcggttaagggaaagcgccgagatgacgggctttctgctgccgcccgcaagcagagggactcggagatcatgcagcagaagcagaaaaaggcaaacgagaagaaggaggaacccaagtagctttgtggcttcgtgtccaaccctcttgcccttcgcctgtgtgcctggagccagtcccaccacgctcgcgtttcctcctgtagtgctcacaggtcccagcaccgatggcattccctttgccctgagtctgcagcgggtcccttttgtgcttcttcccctcaggtaagcctctctncccctgggccacttccgggggtgaagggggttaccccttccagtggtttttattnctgnggggctcaccccaaagtattaaaagtagctttgnaattccaaaaaaaaaaaaaaaaaaagggggggcccttttaaaggatccaagtttacnncc

SEQ ID NO: 2038 - DNA, 716 bp, Homo sapiens
  misc_feature (61)..(61): n equals a,t,g, or c
  misc_feature (69)..(69): n equals a,t,g, or c
  misc_feature (77)..(77): n equals a,t,g, or c
  misc_feature (147)..(147): n equals a,t,g, or c
  misc_feature (508)..(508): n equals a,t,g, or c
  misc_feature (531)..(531): n equals a,t,g, or c
  misc_feature (536)..(536): n equals a,t,g, or c
  misc_feature (568)..(568): n equals a,t,g, or c
  misc_feature (575)..(575): n equals a,t,g, or c
  misc_feature (605)..(605): n equals a,t,g, or c
  misc_feature (612)..(612): n equals a,t,g, or c
  misc_feature (646)..(646): n equals a,t,g, or c
  misc_feature (651)..(651): n equals a,t,g, or c
  misc_feature (668)..(668): n equals a,t,g, or c
  misc_feature (683)..(683): n equals a,t,g, or c
gggagactctctcccagtcccccccgaagggcgtgaccatcccgtaccggcccaagccgtncagctctncggtcatntttgcaggtggtcaggcctataccattcaaggacagtatgccattccacagccagatttgaccaagctgnaccagttggcaatgcaacagtctcattttcccatgacgcatggcaacaccggattcagtgcaggtttggatgcatctgctcagactacttctcatgaactcaccattccaaacgatttgattggctgcataatcgggcgtcaaggcgccaaaatcaatgagatccgtcagatgtctggggcgcagatcaaaattgcgaacccagtggaaggatctactgataggcaggttaccatcactggatctgctgccagcattagcctggctcaatatctaatcaatgtcaggctttcctcggagacgggtggcatggggagcagctagaacaatgcagattcatccataatccctttctgctggtnaccaccacccatgatccatctgnggagnttctgaacagtcaacgattcagggtttaaaanagtttgnaaattttcaagttctacacactttatcatncactcgngaatttttaattaaaagcgtttaattcctttctntggtnaactggtgatgcttganaatccataattaagntttataagctttttccctgggtttttttttttt

SEQ ID NO: 2039 - DNA, 595 bp, Homo sapiens
  misc_feature (17)..(18): n equals a,t,g, or c
  misc_feature (284)..(284): n equals a,t,g, or c
  misc_feature (294)..(294): n equals a,t,g, or c
  misc_feature (304)..(304): n equals a,t,g, or c
  misc_feature (309)..(309): n equals a,t,g, or c
  misc_feature (334)..(334): n equals a,t,g, or c
  misc_feature (336)..(336): n equals a,t,g, or c
  misc_feature (349)..(349): n equals a,t,g, or c
  misc_feature (352)..(352): n equals a,t,g, or c
  misc_feature (355)..(355): n equals a,t,g, or c
  misc_feature (357)..(357): n equals a,t,g, or c
  misc_feature (361)..(361): n equals a,t,g, or c
  misc_feature (364)..(364): n equals a,t,g, or c
  misc_feature (370)..(370): n equals a,t,g, or c
  misc_feature (374)..(375): n equals a,t,g, or c
  misc_feature (377)..(377): n equals a,t,g, or c
  misc_feature (383)..(383): n equals a,t,g, or c
  misc_feature (395)..(395): n equals a,t,g, or c
  misc_feature (403)..(403): n equals a,t,g, or c
  misc_feature (412)..(413): n equals a,t,g, or c
  misc_feature (416)..(416): n equals a,t,g, or c
  misc_feature (419)..(419): n equals a,t,g, or c
  misc_feature (421)..(421): n equals a,t,g, or c
  misc_feature (424)..(424): n equals a,t,g, or c
  misc_feature (430)..(430): n equals a,t,g, or c
  misc_feature (438)..(438): n equals a,t,g, or c
  misc_feature (440)..(440): n equals a,t,g, or c
  misc_feature (451)..(451): n equals a,t,g, or c
  misc_feature (473)..(474): n equals a,t,g, or c
  misc_feature (514)..(514): n equals a,t,g, or c
  misc_feature (574)..(574): n equals a,t,g, or c
  misc_feature (589)..(589): n equals a,t,g, or c
  misc_feature (592)..(593): n equals a,t,g, or c
gggcggaggtgcaggtnntggtgcttgatggtcgaggccatctcctgggccgcctggcggccatcgtggctaaacaggtactgctgggccggaaggtggtggtcgtacgctgtgaaggcatcaacatttctggcaatttctacagaaacaagttgaagtacctggctttcctccgcaagcggatgaacaccaacccttcccgaggcccctaccacttccgggcccccagccgcatcttctggcggaccgtgcgaggtatgctgccccacaaaaccaagcgaggncaggccgctntggaccgctnaaggngtttgacggcttccaaccggctaanancagggaaaaaccnaanggngntccnggntccctnaagnncntgcgtntaaagctaacanaaaagttngctaatttnngcnctngnttnacaagnttggttgnantaccaagccanggacagccaccttgaagaaaannagaaaagagaagcccagatcactaccggaagaagaaccgnttaagagctaccgaaacaggccagaaaacggtgaaaaaaaaattgccaaacccaaaggcntagaaccacgaatcnggnnta

SEQ ID NO: 2040 - DNA, 574 bp, Homo sapiens
  misc_feature (22)..(22): n equals a,t,g, or c
  misc_feature (36)..(36): n equals a,t,g, or c
  misc_feature (336)..(336): n equals a,t,g, or c
  misc_feature (342)..(342): n equals a,t,g, or c
  misc_feature (368)..(368): n equals a,t,g, or c
  misc_feature (391)..(392): n equals a,t,g, or c
  misc_feature (399)..(399): n equals a,t,g, or c
  misc_feature (405)..(405): n equals a,t,g, or c
  misc_feature (411)..(412): n equals a,t,g, or c
  misc_feature (417)..(417): n equals a,t,g, or c
  misc_feature (423)..(423): n equals a,t,g, or c
  misc_feature (427)..(427): n equals a,t,g, or c
  misc_feature (429)..(429): n equals a,t,g, or c
  misc_feature (434)..(434): n equals a,t,g, or c
  misc_feature (436)..(437): n equals a,t,g, or c
  misc_feature (441)..(441): n equals a,t,g, or c
  misc_feature (444)..(444): n equals a,t,g, or c
  misc_feature (448)..(448): n equals a,t,g, or c
  misc_feature (455)..(455): n equals a,t,g, or c
  misc_feature (467)..(467): n equals a,t,g, or c
  misc_feature (470)..(470): n equals a,t,g, or c
  misc_feature (515)..(515): n equals a,t,g, or c
  misc_feature (527)..(527): n equals a,t,g, or c
  misc_feature (541)..(541): n equals a,t,g, or c
  misc_feature (546)..(546): n equals a,t,g, or c
  misc_feature (562)..(562): n equals a,t,g, or c
ggcgaaccacgtgggtcccgtncgcgtttcgggtgntggcggctgcagccggagttcaaacctaagcagctggaaggaaccatggccaactgtgagcgtaccttcattgcgatcaaaccagatggggtccagcggggtcttgtgggagagattatcaagcgttttgagcagaaaggattccgccttgttggtctgaaattcatgcaagcttccgaagatcttctcaaggaacactacgttgacctgaaggaccgtccattctttgccggcctggtgaaatacatgcactcagggcccggtagttgcatggtctgggaggggctgaatgtggtgaanaccggncgagcatgctcgggagaccaaccttnaaacttcaagcctgggaacatcnnggagacntttggntaccannttgcnggaacnttancntggcnanngatnttngganaaggcanaaaaaggaaaanggntttggggtttcacccttgggaactgggaaaatacccagcttgggnttaaaattgganctattaatgccggnggccnaacccattggttttcnaaacctttcccc

SEQ ID NO: 2041 - DNA, 451 bp, Homo sapiens
  misc_feature (209)..(209): n equals a,t,g, or c
  misc_feature (368)..(368): n equals a,t,g, or c
  misc_feature (373)..(373): n equals a,t,g, or c
  misc_feature (402)..(402): n equals a,t,g, or c
  misc_feature (437)..(437): n equals a,t,g, or c
  misc_feature (445)..(445): n equals a,t,g, or c
gcttggtagtctgttagtggtagatccttgttgccgtcccttcgcctccttcaccgccgcagaccccttcaagttctagtcatgcgtgagtgcatctccatccacgttggccaggctggtgtccagattggcaatgcctgctgggagctctactgcctggaacacggcatccagcccgatggccagatgccaagtgacaagaccattgngggaggagatgattccttcaacaccttcttcagtgaaacgggtgctggcaagcatgtgccccgggcaagtgtttgtagacttggaacccacagtcattgatgaagttcgcactgcacctaccgccagctcttcaccctgagcagcttaacacaagccangaaanaacttgccaaaactatatcccagggcacntaacccttttggcaaggggaatccattggcccctngggttggncccgaa

SEQ ID NO: 2042 - DNA, 791 bp, Homo sapiens
  misc_feature (12)..(12): n equals a,t,g, or c
  misc_feature (22)..(22): n equals a,t,g, or c
  misc_feature (65)..(66): n equals a,t,g, or c
  misc_feature (76)..(76): n equals a,t,g, or c
  misc_feature (379)..(379): n equals a,t,g, or c
  misc_feature (404)..(404): n equals a,t,g, or c
  misc_feature (417)..(417): n equals a,t,g, or c
  misc_feature (419)..(419): n equals a,t,g, or c
  misc_feature (522)..(522): n equals a,t,g, or c
  misc_feature (594)..(594): n equals a,t,g, or c
  misc_feature (629)..(629): n equals a,t,g, or c
  misc_feature (729)..(729): n equals a,t,g, or c
  misc_feature (758)..(758): n equals a,t,g, or c
  misc_feature (776)..(776): n equals a,t,g, or c
  misc_feature (781)..(781): n equals a,t,g, or c
  misc_feature (789)..(789): n equals a,t,g, or c
tacgcctgttcnaccggtccgnaattcccgggtcgacccacgcgtccgggctgacaggtatgatnnggttacaganaatatgctccatagccctggttggcaaatacaccaagctcagagactgctacgcctctgtgttcaaagccctggaacactcagccctggccatcaaccacaagttgaatctgatgtacatagactccattgatctggagaagatcactgaaaccgaggaccctgtgaaatttcatgaagcttggcagaagctatgcaaagctgatggtattcttgtgcctggaggctttggaatcagaggaacattgggaaaactccaggcgatttcttgggcaaggacaaagaagattccttttctgggagnttggcttgggaagccactaggaaanggttgaatttggnangaaaattgccttactttgaaagaagctgattccacagagttaaggccaaatgccccagttcctctggtgattgatatgcccgagcacaaccctgcaatttggnaggaacaatgagactgggaataagaagaactgttttcaaaactgaaaattcaatattaaggaactttatggngatgtcctttatagaagaaagacacagacatcggntcgaggtaaaccctacctgatcaaacaatttagcagaaggcttaagtttgaggtcaggatgttgatggagacaggatggaatattgactggcaaacatcntaatttgtggggccagttcatccgagttntttaggccataagccttncctcnaaattggntt

SEQ ID NO: 2043 - DNA, 620 bp, Homo sapiens
  misc_feature (557)..(557): n equals a,t,g, or c
  misc_feature (568)..(568): n equals a,t,g, or c
  misc_feature (599)..(599): n equals a,t,g, or c
  misc_feature (603)..(603): n equals a,t,g, or c
  misc_feature (611)..(611): n equals a,t,g, or c
gcggcgccgcgcggtgaggttgtctagtccacgctcggagccatgccgtccaagggtccgctgcagtcggtgcaggtcttcggacgcaagaagacagcgacagctgtggcgcactgcaaacgcggcaatggtctcatcaaggtgaacgggcggcccctggagatgattgagccgcgcacgctacagtacaagctgctggagccagttctgcttctcggcaaggagcgatttgctggtgtagacatccgtgtccgtgtaaagggtggtggtcacgtggcccagatttatgctatccgtcagtccatctccaaagccctggtggcctattaccagaaatatgtggatgaggcttccaagaaggagatcaaagacatcctcatccagtatgaccggaccctgctggtagctgaccctcgtcgctgcgagtccaaaaagtttggaggccctggtgcccgcgctcgctaccagaaatcctaccgataagcccatcgtgactcaaaactcacttgtataataaacaggttttgagggattttaaaggttcaagaactgtgtgngggccttatgngttggtaattggatgtttaaccagaccgaantcantaaacatnctggaccta

SEQ ID NO: 2044 - DNA, 554 bp, Homo sapiens
  misc_feature (8)..(8): n equals a,t,g, or c
  misc_feature (39)..(39): n equals a,t,g, or c
  misc_feature (47)..(47): n equals a,t,g, or c
  misc_feature (57)..(58): n equals a,t,g, or c
  misc_feature (77)..(77): n equals a,t,g, or c
  misc_feature (81)..(81): n equals a,t,g, or c
  misc_feature (97)..(97): n equals a,t,g, or c
  misc_feature (280)..(280): n equals a,t,g, or c
  misc_feature (305)..(305): n equals a,t,g, or c
  misc_feature (341)..(341): n equals a,t,g, or c
  misc_feature (356)..(356): n equals a,t,g, or c
  misc_feature (374)..(374): n equals a,t,g, or c
  misc_feature (381)..(381): n equals a,t,g, or c
  misc_feature (390)..(390): n equals a,t,g, or c
  misc_feature (401)..(401): n equals a,t,g, or c
  misc_feature (425)..(425): n equals a,t,g, or c
  misc_feature (428)..(428): n equals a,t,g, or c
  misc_feature (432)..(432): n equals a,t,g, or c
  misc_feature (449)..(449): n equals a,t,g, or c
  misc_feature (473)..(473): n equals a,t,g, or c
  misc_feature (513)..(513): n equals a,t,g, or c
  misc_feature (524)..(524): n equals a,t,g, or c
  misc_feature (540)..(540): n equals a,t,g, or c
  misc_feature (542)..(542): n equals a,t,g, or c
ggagcggnctgaggaaacccagagggaccaagcgctganaccaaagntgaccctcgnntagggttgtcctgcctggngccncacttgaaggaggcangacagaggcaccgaggccagggagacgcccaacgaggcagtcctgggctcttctctggcctcctcaccagggcacccatccaaggaacctcctaacagccaggaaaagccatgagttgcaaccaaaacgcggctgaggatggaactcataatgaaactgcaacccacctgcccccagccctgnccctcgccctgatgcgaagctgganaggggcgtgctgcgtggccctgatgcccccacccanctcggtccagcgcgnccctgcccaggaggcggnagccggncgcaccctnggcaggcctgnttgaagttgctgagggcactgaangcncggnccgccctttccaaagcncatacttaaccgaatggttaacanactggcttgtccttggcaaggggcttttcaactggcacanggttttttaanacctttcctttttttntntttttttaaaaa

SEQ ID NO: 2045 - DNA, 644 bp, Homo sapiens
  misc_feature (16)..(16): n equals a,t,g, or c
  misc_feature (371)..(371): n equals a,t,g, or c
  misc_feature (444)..(444): n equals a,t,g, or c
  misc_feature (481)..(481): n equals a,t,g, or c
  misc_feature (504)..(504): n equals a,t,g, or c
  misc_feature (508)..(508): n equals a,t,g, or c
  misc_feature (510)..(510): n equals a,t,g, or c
  misc_feature (521)..(521): n equals a,t,g, or c
  misc_feature (528)..(528): n equals a,t,g, or c
  misc_feature (539)..(539): n equals a,t,g, or c
  misc_feature (556)..(556): n equals a,t,g, or c
  misc_feature (570)..(570): n equals a,t,g, or c
  misc_feature (601)..(601): n equals a,t,g, or c
  misc_feature (614)..(614): n equals a,t,g, or c
  misc_feature (641)..(641): n equals a,t,g, or c
ggtcagccgcatcttnttttgcgtcgccagccgagccacatcgctcagacaccatggggaaggtgaaggtcggagtcaacggatttggtcgtattgggcgcctggtcaccagggctgcttttaactctggtaaagtggatattgttgccatcaatgaccccttcattgacctcaactacatggtttacatgttccaatatgattccacccatggcaaattccatggcaccgtcaaggctgagaacgggaagcttgtcatcaatggaaatcccatcaccatcttccaggagcgagatccctccaaaatcaagtggggcgatgctggcgctgagtacgtcgtggagtccactggcgtcttcaccaccatgganaagctggggctcatttgcaggggggagccaaaagggtcatcatctctgcccccttttgctgatgcccccatgntcgcatgggtgtgaaccatgagaagtatgacaacagnctcaagatcattaacaatgcctnctgnancaaccaactgnttaacanccctggccaanggcattccttgacaacnttggtaatcggggnaaggacttaaggaccacaggccattgccatnaattgcaacccanaaaactgggggatgggccccttccggnaaa

SEQ ID NO: 2046 - DNA, 821 bp, Homo sapiens
  misc_feature (3)..(4): n equals a,t,g, or c
  misc_feature (7)..(7): n equals a,t,g, or c
  misc_feature (17)..(17): n equals a,t,g, or c
  misc_feature (507)..(507): n equals a,t,g, or c
  misc_feature (645)..(645): n equals a,t,g, or c
  misc_feature (672)..(672): n equals a,t,g, or c
  misc_feature (695)..(695): n equals a,t,g, or c
  misc_feature (700)..(700): n equals a,t,g, or c
  misc_feature (744)..(744): n equals a,t,g, or c
  misc_feature (813)..(813): n equals a,t,g, or c
ccnnatnctggttaaantgcaccaccgctccggaattcccgggtcgacccacgcgtccggcctcggctccagcgttttggtgccctccaggaagttcttcgttgggggaaactggaagatgaacgggcggaagcagagcctgggggagctcatcggcactctgaacgcggccaaggtgccggccgacaccgaggtggtttgtgctccccctactgcctatatcgacttcgcccggcagaagctagatcccaagattgctgtggctgcgcagaactgctacaaagtgactaatggggcttttactggggagatcagccctggcatgatcaaagactgcggagccacgtgggtggtcctggggcactcagagagaaggcatgtctttggggagtcagatgagctgattgggcagaaagtggcccatgctctggcagagggactcggagtaatcgcctgcattggggagaagctagatgaaagggaagctggcatcactgagaaggttgntttcgagcagacaaaggtcatcgcagataacgtgaaggactggagcaaggtcgtcctgcctatgaacctgtgtgggccattggtactggcaagactgcaacaccccaacaggcccaggaagtacacgagaagcccccnaggatggcttgaagtccaacgtctctnatgcggtggctcaaagcacccgnatcanttatggaggctcttgtgactgggggcaacctgcaaggaactggncaagccagcctgatgtggatggctttccttgggggtgggggctttccttcaagcccgaaattcgggggncatcatca

SEQ ID NO: 2047 - DNA, 698 bp, Homo sapiens
  misc_feature (11)..(11): n equals a,t,g, or c
  misc_feature (13)..(13): n equals a,t,g, or c
  misc_feature (79)..(79): n equals a,t,g, or c
  misc_feature (94)..(94): n equals a,t,g, or c
  misc_feature (389)..(389): n equals a,t,g, or c
  misc_feature (403)..(403): n equals a,t,g, or c
  misc_feature (500)..(500): n equals a,t,g, or c
  misc_feature (583)..(583): n equals a,t,g, or c
  misc_feature (616)..(616): n equals a,t,g, or c
  misc_feature (644)..(644): n equals a,t,g, or c
  misc_feature (673)..(673): n equals a,t,g, or c
  misc_feature (696)..(696): n equals a,t,g, or c
  misc_feature (698)..(698): n equals a,t,g, or c
ggttccaacanangaccccttaatgttgatcggcatgttggaatggcagtagcaggtttgttggcagatgctcgttctntagcagacatagcangagaagaagcttccaacttcagatctaactttggctacaacattccactaaaacatcttgcagacagagtggccatgtatgtgcatgcatatacactctacagtgctgttagaccttttggctgcagtttcatgttagggtcttacagtgtgaatgacggtgcgcaactctacatgattgacccatcaggtgtttcatacggttattggggctgtgccatcggcaaagccaggcaagctgcaaagacggaaatagagaagcttcagatgaaagaaatgacctgccgtgatatcgntaaagaagatgcanaaataatttacatagtacatgacgaagttaaggataaagcttttgaactagaactcagctgggttggtgaattaactaatggaagacatgaaattgntccaaaagatataagagaagaagcagagaaatatgctaaggaatctctgaaggaagaagatgaatcagatgatgataataccnaacatttactccagcatctattggattttaaanttctactccggtccatggaactatttancctggattatacatactggccaattttanttaatttttgcctataaaaaaancn

SEQ ID NO: 2048 - DNA, 479 bp, Homo sapiens
  misc_feature (6)..(6): n equals a,t,g, or c
  misc_feature (12)..(12): n equals a,t,g, or c
  misc_feature (14)..(14): n equals a,t,g, or c
  misc_feature (66)..(66): n equals a,t,g, or c
  misc_feature (98)..(98): n equals a,t,g, or c
  misc_feature (128)..(128): n equals a,t,g, or c
  misc_feature (146)..(146): n equals a,t,g, or c
  misc_feature (192)..(192): n equals a,t,g, or c
  misc_feature (229)..(229): n equals a,t,g, or c
  misc_feature (245)..(246): n equals a,t,g, or c
  misc_feature (256)..(256): n equals a,t,g, or c
  misc_feature (264)..(264): n equals a,t,g, or c
  misc_feature (280)..(280): n equals a,t,g, or c
  misc_feature (282)..(282): n equals a,t,g, or c
  misc_feature (292)..(292): n equals a,t,g, or c
  misc_feature (294)..(294): n equals a,t,g, or c
  misc_feature (298)..(298): n equals a,t,g, or c
  misc_feature (302)..(303): n equals a,t,g, or c
  misc_feature (324)..(324): n equals a,t,g, or c
  misc_feature (330)..(330): n equals a,t,g, or c
  misc_feature (333)..(333): n equals a,t,g, or c
  misc_feature (348)..(348): n equals a,t,g, or c
  misc_feature (350)..(350): n equals a,t,g, or c
  misc_feature (356)..(356): n equals a,t,g, or c
  misc_feature (365)..(365): n equals a,t,g, or c
  misc_feature (373)..(373): n equals a,t,g, or c
  misc_feature (381)..(381): n equals a,t,g, or c
  misc_feature (385)..(385): n equals a,t,g, or c
  misc_feature (423)..(423): n equals a,t,g, or c
  misc_feature (472)..(472): n equals a,t,g, or c
  misc_feature (479)..(479): n equals a,t,g, or c
tggacnactgangnttaaatatccacagggttacattttgcttgttgaactcttagagctattgcnaacttcccaagatccagatgactgaatttcanatagcatttttatgattcccaactcattgnaggccttatttatataantttttccaagccaaggagaccattggccattccaggaaaatttcgnacagcttgaactataggcaggatggtcaacaatcagnttacttgcagctgganngcattaggtnttgaagtngtacattagaataagngntcattgacancntggnatgnngctatggtactacaagctggnggattntancaaacattaagcttntntaaganaataattgncagcgaanaatgagcntctngctctggactgaatattgcttattttcaaatgagttgnagaatagttctttatggatctgcaatctatcatcataatgctatgcttnaaaaaan

SEQ ID NO: 2049 - DNA, 405 bp, Homo sapiens
  misc_feature (49)..(49): n equals a,t,g, or c
  misc_feature (51)..(51): n equals a,t,g, or c
  misc_feature (54)..(54): n equals a,t,g, or c
  misc_feature (56)..(56): n equals a,t,g, or c
  misc_feature (86)..(86): n equals a,t,g, or c
  misc_feature (358)..(358): n equals a,t,g, or c
  misc_feature (360)..(360): n equals a,t,g, or c
  misc_feature (368)..(368): n equals a,t,g, or c
  misc_feature (371)..(371): n equals a,t,g, or c
  misc_feature (403)..(403): n equals a,t,g, or c
aacgcctgcaggtaccggtccggaattcccgggtcgacccacgcgtccntncgntngtgcaggtcctggtgcttgatgggcgaggncatctcctgggccgcctggcggccatcgtggctaaacaggtactgctgggccggaaggtggtggtcgtacgctgtgaaggcatcaacatttctggcaatttctacagaaacaagttgaagtacctggctttcctccgcaagcggatgaacaccaacccttcccgaggcccctaccacttccgggcccccagccgcatcttctggcggaccgtgcgaggtatgctgccccacaaaaccaagcgaggccaggccgctctggaccgtctcaaggngnttgacggnatnccaccgccctacgacaagaaaaagcggatggngg

SEQ ID NO: 2050 - DNA, 480 bp, Homo sapiens
  misc_feature (66)..(66): n equals a,t,g, or c
gttttttttatgcaggagagtttaagagaaatcagcacagatatttcaaaaaagcccatgtctttntatctttaaaatatctatttatcaaaggccagacacagaggctcacgcctgtaatcccagcactttgggaggcgggcagatcacaaggtcaggagtttgagaccggcctggccaacatggtgaaaccccgtctctactaaaaatacaaaaatttgctgggcatggtggcgcgtgcctgtaatcccagctactaggggggctgaggcaggaggatcgcttgaacctgagaggcagaggttgcagtgagccaagatcatgccactttactccagtctgagcaacagaacgagacttagtcaaaataaataaataaataaataaataaataaaatatctttttatctttaaagtgtttaacattggtatactgtctgtagttggttcattagtcggttataaagggttattttctca

SEQ ID NO: 2051 - DNA, 703 bp, Homo sapiens
  misc_feature (3)..(3): n equals a,t,g, or c
  misc_feature (11)..(12): n equals a,t,g, or c
  misc_feature (359)..(359): n equals a,t,g, or c
  misc_feature (400)..(400): n equals a,t,g, or c
  misc_feature (469)..(469): n equals a,t,g, or c
  misc_feature (472)..(472): n equals a,t,g, or c
  misc_feature (474)..(474): n equals a,t,g, or c
  misc_feature (569)..(569): n equals a,t,g, or c
  misc_feature (573)..(573): n equals a,t,g, or c
  misc_feature (589)..(589): n equals a,t,g, or c
  misc_feature (602)..(602): n equals a,t,g, or c
  misc_feature (641)..(641): n equals a,t,g, or c
  misc_feature (654)..(654): n equals a,t,g, or c
  misc_feature (672)..(672): n equals a,t,g, or c
  misc_feature (690)..(690): n equals a,t,g, or c
  misc_feature (694)..(694): n equals a,t,g, or c
gtncccgggtnnttgctgccgaaatgggcaagttcatgaaacctgggaaggtggtgcttgtcctggctggacgctactccggacgcaaagctgtcatcgtgaagaacattgatgatggcacctcagatcgcccctacagccatgctctggtggctggaattgaccgctacccccgcaaagtgacagctgccatgggcaagaagaagatcgccaagagatcaaagataaaatcttttgtgaaagtgtataactacaatcacctaatgcccacaaggtactctgtggatatccccttggacaaaactgtcgcaataaggatgtcttcagagatcctgctcttaaacgcaaggcccgacggnaggccaaggtcaagtttgaagagagatacaagacaggcaanaaacaagtggttcttccagaaactgcggttttagatgctttggtttgatcattaaaaattataaagaanaananaaaaaaaggcggccgctctagaggatccaagcttacgtacgcgtgcatgcgacgcatagctcttctatagtggcacctaaattcaattcactggnccgncgttttacaacgtcgngactgggaaaaancctgcggtacccaacttaatcgcttgcagcaaatccccntttgccagttgcngaaaaaccaaaaggcccngaaccgatggcctttccnacanttgccaact

SEQ ID NO: 2052 - DNA, 605 bp, Homo sapiens
  misc_feature (21)..(21): n equals a,t,g, or c
  misc_feature (271)..(271): n equals a,t,g, or c
  misc_feature (347)..(347): n equals a,t,g, or c
  misc_feature (480)..(480): n equals a,t,g, or c
  misc_feature (551)..(551): n equals a,t,g, or c
  misc_feature (555)..(555): n equals a,t,g, or c
  misc_feature (590)..(590): n equals a,t,g, or c
  misc_feature (593)..(593): n equals a,t,g, or c
  misc_feature (599)..(599): n equals a,t,g, or c
ggcgaggtcgttttccgggcncttggagaagatggtgctgcggcggctgctggccgccctgctgcacagcccgcagctggtggaacgtctgtcagagtcgcggcctatccgacgtgcggcgcagctcacggccttcgcactgctgcaggcccagctgcggggccaggacgcggcccgccgcctgcaggacctcgcggctgggcccgtgggctccctgtgccgccgcgctgagcgatttagagacgccttcacccaggagctacgccgcggnctccgaggccgctcggggccaccaccaggtagccagaggggccctggcgcaaacatttaatcctgggctgtgcggngccgaggccgcttgcttttccttccggctctacagtgcatcaatgtggaggggcattccggcactgcgcgcggcttcgaatcccgactggaattgttgcctgagacatccacgcataagacctaggcagccgnccgtccgtgaagcttgtattgacaagacacagtgtgagaagacctagctacagaataaggagctggtcagnacgnactacgagagcacgacgaacagaagcttcttgagnggntgaatnttaaat

SEQ ID NO: 2053 - DNA, 640 bp, Homo sapiens
  misc_feature (3)..(3): n equals a,t,g, or c
  misc_feature (12)..(12): n equals a,t,g, or c
  misc_feature (14)..(14): n equals a,t,g, or c
  misc_feature (25)..(25): n equals a,t,g, or c
  misc_feature (33)..(33): n equals a,t,g, or c
  misc_feature (71)..(71): n equals a,t,g, or c
  misc_feature (75)..(75): n equals a,t,g, or c
  misc_feature (110)..(110): n equals a,t,g, or c
  misc_feature (153)..(153): n equals a,t,g, or c
  misc_feature (161)..(161): n equals a,t,g, or c
  misc_feature (167)..(167): n equals a,t,g, or c
  misc_feature (182)..(182): n equals a,t,g, or c
  misc_feature (204)..(204): n equals a,t,g, or c
  misc_feature (220)..(220): n equals a,t,g, or c
  misc_feature (230)..(230): n equals a,t,g, or c
  misc_feature (238)..(238): n equals a,t,g, or c
  misc_feature (241)..(242): n equals a,t,g, or c
  misc_feature (245)..(245): n equals a,t,g, or c
  misc_feature (249)..(251): n equals a,t,g, or c
  misc_feature (255)..(255): n equals a,t,g, or c
  misc_feature (259)..(259): n equals a,t,g, or c
  misc_feature (268)..(268): n equals a,t,g, or c
  misc_feature (270)..(270): n equals a,t,g, or c
  misc_feature (280)..(280): n equals a,t,g, or c
  misc_feature (288)..(288): n equals a,t,g, or c
  misc_feature (318)..(318): n equals a,t,g, or c
  misc_feature (323)..(323): n equals a,t,g, or c
  misc_feature (344)..(344): n equals a,t,g, or c
  misc_feature (354)..(354): n equals a,t,g, or c
  misc_feature (358)..(358): n equals a,t,g, or c
  misc_feature (378)..(378): n equals a,t,g, or c
  misc_feature (395)..(395): n equals a,t,g, or c
  misc_feature (408)..(408): n equals a,t,g, or c
  misc_feature (413)..(413): n equals a,t,g, or c
  misc_feature (434)..(434): n equals a,t,g, or c
  misc_feature (451)..(451): n equals a,t,g, or c
  misc_feature (464)..(464): n equals a,t,g, or c
  misc_feature (498)..(500): n equals a,t,g, or c
  misc_feature (507)..(507): n equals a,t,g, or c
  misc_feature (531)..(531): n equals a,t,g, or c
  misc_feature (536)..(536): n equals a,t,g, or c
  misc_feature (550)..(550): n equals a,t,g, or c
  misc_feature (595)..(595): n equals a,t,g, or c
  misc_feature (609)..(609): n equals a,t,g, or c
  misc_feature (619)..(619): n equals a,t,g, or c
  misc_feature (637)..(637): n equals a,t,g, or c
ttngggcaagcntngaagcagtagnttcactgntagctggtctccctctgcagcctgaagaaggagatggngcgnaattgatggaagccaaatcacagttatttcttaantacttcacattatttatgaaccttttgaatgactgcagtgaanttgaagangaaagngcgcaaacaggtggnaggaaacgtggtatgtctcggnggctggcatcactgangcactgtacngtccttgnaannggncaannntaantaangccaagaanancgggggtttnatccctcnataggcttaggttaccacccggatttccanacaangagcttccatttatgggaagntctgacaganaatncttcaacaagggcacagaantttgacacacttgcagnaaacagtaattgnctganccggtttgagagattggtagnaactgtcacaatgatgnggtgatcaagganaactccctatagcgaagggctctggccaatgagnnnccttgtnctcagggggatgaactactcgagntctgnctactctgattganctcggcatttactctaccaactgctctggaacatggtttctaagnaaaggataaaaggnaagacttctntgcagactctcttccgangca

SEQ ID NO: 2054 - DNA, 768 bp, Homo sapiens
  misc_feature (2)..(2): n equals a,t,g, or c
  misc_feature (23)..(23): n equals a,t,g, or c
  misc_feature (47)..(47): n equals a,t,g, or c
  misc_feature (49)..(49): n equals a,t,g, or c
  misc_feature (54)..(54): n equals a,t,g, or c
  misc_feature (107)..(107): n equals a,t,g, or c
  misc_feature (263)..(263): n equals a,t,g, or c
  misc_feature (270)..(270): n equals a,t,g, or c
  misc_feature (273)..(274): n equals a,t,g, or c
  misc_feature (280)..(280): n equals a,t,g, or c
  misc_feature (288)..(288): n equals a,t,g, or c
  misc_feature (299)..(300): n equals a,t,g, or c
  misc_feature (311)..(311): n equals a,t,g, or c
  misc_feature (321)..(321): n equals a,t,g, or c
  misc_feature (327)..(327): n equals a,t,g, or c
  misc_feature (334)..(335): n equals a,t,g, or c
  misc_feature (347)..(347): n equals a,t,g, or c
  misc_feature (351)..(351): n equals a,t,g, or c
  misc_feature (354)..(354): n equals a,t,g, or c
  misc_feature (356)..(356): n equals a,t,g, or c
  misc_feature (369)..(369): n equals a,t,g, or c
  misc_feature (383)..(383): n equals a,t,g, or c
  misc_feature (387)..(387): n equals a,t,g, or c
  misc_feature (396)..(396): n equals a,t,g, or c
  misc_feature (406)..(406): n equals a,t,g, or c
  misc_feature (410)..(410): n equals a,t,g, or c
  misc_feature (415)..(415): n equals a,t,g, or c
  misc_feature (419)..(419): n equals a,t,g, or c
  misc_feature (421)..(422): n equals a,t,g, or c
  misc_feature (425)..(425): n equals a,t,g, or c
  misc_feature (459)..(460): n equals a,t,g, or c
  misc_feature (469)..(469): n equals a,t,g, or c
  misc_feature (479)..(479): n equals a,t,g, or c
  misc_feature (501)..(501): n equals a,t,g, or c
  misc_feature (507)..(508): n equals a,t,g, or c
  misc_feature (517)..(518): n equals a,t,g, or c
  misc_feature (529)..(529): n equals a,t,g, or c
  misc_feature (533)..(533): n equals a,t,g, or c
  misc_feature (536)..(536): n equals a,t,g, or c
  misc_feature (543)..(543): n equals a,t,g, or c
  misc_feature (548)..(548): n equals a,t,g, or c
  misc_feature (568)..(568): n equals a,t,g, or c
  misc_feature (580)..(580): n equals a,t,g, or c
  misc_feature (617)..(617): n equals a,t,g, or c
  misc_feature (634)..(634): n equals a,t,g, or c
  misc_feature (640)..(640): n equals a,t,g, or c
  misc_feature (657)..(657): n equals a,t,g, or c
  misc_feature (674)..(674): n equals a,t,g, or c
  misc_feature (684)..(684): n equals a,t,g, or c
  misc_feature (686)..(686): n equals a,t,g, or c
  misc_feature (700)..(700): n equals a,t,g, or c
  misc_feature (756)..(756): n equals a,t,g, or c
gngaaccgcccggaattcccggntcgacccacgcgtccgggcggagntncaggncctgttgcttgatggtcgaggccatctcctgggccgcctggcggccatcgtgnctaaacaggtactgctgggccggaaggtggtggtcgtacgctgtgaaggcatcaacatttctggcaatttctacagaaacaagttgaagtacctggctttcctccgcaagcggatgaacaccaacccttcccgaggcccctaccacttccggcccncaggcgnaanntttggnggaccggnccaaaggaatnntggcccaacanaaaccaagcnagggcnaggcccnnttctggaaccgnattnaangntggtttagacggnaattccaaactggncctnacgaacaangaaaaaaagncggnaatgngtangnnttncctggctgggcccttcaaagggacccgtgccggnnctggaaagnccctaaccanggaaaaagttttggccctaatnttgggnngcccgcccnngggctttaacngaanggnttggganttggnaaaggtacccagggccaagngaacaggcccanccttggaaggaagaaagaagggaaacgaagaaaaggncaaggatccacttaccnggaagnaggaaacagctaatgangctacggaaaaaagccnagaaagaacntngagaagaaaatggncaaatacacagaggtccttaagaccaaggacttcagggctgagcccataaaaatgntaaattctaaaa

SEQ ID NO: 2055 - DNA, 637 bp, Homo sapiens
  misc_feature (8)..(8): n equals a,t,g, or c
  misc_feature (10)..(10): n equals a,t,g, or c
  misc_feature (238)..(240): n equals a,t,g, or c
  misc_feature (249)..(249): n equals a,t,g, or c
  misc_feature (251)..(251): n equals a,t,g, or c
  misc_feature (254)..(254): n equals a,t,g, or c
  misc_feature (256)..(256): n equals a,t,g, or c
  misc_feature (275)..(275): n equals a,t,g, or c
  misc_feature (279)..(279): n equals a,t,g, or c
  misc_feature (287)..(287): n equals a,t,g, or c
  misc_feature (293)..(294): n equals a,t,g, or c
  misc_feature (299)..(299): n equals a,t,g, or c
  misc_feature (312)..(312): n equals a,t,g, or c
  misc_feature (314)..(314): n equals a,t,g, or c
  misc_feature (331)..(331): n equals a,t,g, or c
  misc_feature (343)..(343): n equals a,t,g, or c
  misc_feature (346)..(346): n equals a,t,g, or c
  misc_feature (352)..(352): n equals a,t,g, or c
  misc_feature (360)..(360): n equals a,t,g, or c
  misc_feature (365)..(365): n equals a,t,g, or c
  misc_feature (376)..(376): n equals a,t,g, or c
  misc_feature (400)..(400): n equals a,t,g, or c
  misc_feature (463)..(463): n equals a,t,g, or c
  misc_feature (502)..(502): n equals a,t,g, or c
  misc_feature (505)..(505): n equals a,t,g, or c
  misc_feature (525)..(525): n equals a,t,g, or c
  misc_feature (564)..(564): n equals a,t,g, or c
  misc_feature (574)..(574): n equals a,t,g, or c
  misc_feature (595)..(595): n equals a,t,g, or c
  misc_feature (616)..(616): n equals a,t,g, or c
  misc_feature (634)..(634): n equals a,t,g, or c
gccagaantnaggtgtcgtgaaaactacccctaaaagccaaaatgggaaaggaaaagactcatatcaacattgtcgtcattggacacgtagattcgggcaagtccaccactactggccatctgatctataaatgcggtggcatcgacaaaagaaccattgaaaaatttgagaaggaggctgctgagatgggaaagggctccttcaagtatgcctgggtcttggataaactgaaagctnnnccgggaacngngcnantcacccttggaaacctccnttgntggaaaantttggnnacccngcaaggtactatngngaactaatcaattgatngccccaaggacnccngagacntttatcanaaaancatggattacnggggacatctcaaggctgactggngctgtcctgattgttgctgctgctgttggcgaatttggaagcttggtatctcccaagaatggnccagacccgagagcatgcccttctggcttacacactggntgngaaacactaaatgtcggtgntaacaaaatgggattccactgagccaccctacagcagangaagatatgnaggaaatgttaagggaagccngcacttacattaagaaaattngcttccaccccgacacangta

SEQ ID NO: 2056 - DNA, 711 bp, Homo sapiens
  misc_feature (14)..(14): n equals a,t,g, or c
  misc_feature (23)..(23): n equals a,t,g, or c
  misc_feature (32)..(32): n equals a,t,g, or c
  misc_feature (74)..(74): n equals a,t,g, or c
  misc_feature (83)..(83): n equals a,t,g, or c
  misc_feature (319)..(319): n equals a,t,g, or c
  misc_feature (356)..(356): n equals a,t,g, or c
  misc_feature (525)..(525): n equals a,t,g, or c
  misc_feature (598)..(598): n equals a,t,g, or c
  misc_feature (705)..(708): n equals a,t,g, or c
  misc_feature (710)..(710): n equals a,t,g, or c
aaggcttctggggnaacgttccnaggtaccgntccggaattcccgggtcgacccacgcgtccgggcggaggttnaggtcctgntgcttgatggtcgaggccatctcctgggccgcctggcggccatcgtggctaaacaggtactgctgggccggaaggtggtggtcgtacgctgtgaaggcatcaacatttctggcaatttctacagaaacaagttgaagtacctggctttcctccgcaagcggatgaacaccaacccttcccgaggcccctaccacttccgggcccccagccgcatcttctggcggaccgtgccaagnatgctggcccaacaaaaccaacgaaggcccaggccgntctggaccgtctcaaggtgtttgacggcatcccaccgcctacgacaagaaaaagcggatggtggttcctgctgccctcaaggtccgtgcgtctgaagcctacaagaaagtttgcctatctggggcgcctggctcacgaggttggctggaagtaccaaggcagtgacagncaccctggaggagaagaaggaaagagaaagccaaagatcactaccggaagaagaaacagctcatgaggctacngaaacaggccgagaagaacgtggagaagaaaattgacaaatacacagaggcctcaagaccacggattctggctgagccaataaagatgtaatctcaaaaaaaaaaannnntna

SEQ ID NO: 2057 - DNA, 349 bp, Homo sapiens
  misc_feature (4)..(4): n equals a,t,g, or c
  misc_feature (17)..(17): n equals a,t,g, or c
  misc_feature (19)..(19): n equals a,t,g, or c
  misc_feature (38)..(38): n equals a,t,g, or c
  misc_feature (84)..(84): n equals a,t,g, or c
  misc_feature (101)..(103): n equals a,t,g, or c
  misc_feature (108)..(108): n equals a,t,g, or c
  misc_feature (112)..(112): n equals a,t,g, or c
  misc_feature (154)..(154): n equals a,t,g, or c
  misc_feature (194)..(194): n equals a,t,g, or c
  misc_feature (199)..(200): n equals a,t,g, or c
  misc_feature (236)..(236): n equals a,t,g, or c
  misc_feature (243)..(244): n equals a,t,g, or c
  misc_feature (259)..(259): n equals a,t,g, or c
  misc_feature (280)..(280): n equals a,t,g, or c
  misc_feature (287)..(287): n equals a,t,g, or c
  misc_feature (305)..(305): n equals a,t,g, or c
  misc_feature (308)..(308): n equals a,t,g, or c
caancagaattggctgntntggtttgagagattggtgnaactggtcacaatgatgccagatcaaggagaactccctatagcganggctctggccaatgggnnnccttnattncagtgggaagaactagctcgagatctgcctactctggttganctcgccatttactctaccaactgctctgcaccatggtttntaaanncgtacgaattggtagactccatgcaaactctcttcncaggcannagcttggccagtaanaataatgacattctggtttcncgggaanatgggggtaactaatttnccnaaaacttcctgggatccttttattacccaaattgggggaac

SEQ ID NO: 2058 - DNA, 738 bp, Homo sapiens
  misc_feature (37)..(37): n equals a,t,g, or c
  misc_feature (698)..(698): n equals a,t,g, or c
  misc_feature (722)..(722): n equals a,t,g, or c
  misc_feature (724)..(724): n equals a,t,g, or c
  misc_feature (737)..(738): n equals a,t,g, or c
cgggggggggaaaacgggaaagacttcctataggganagctggtacgcctgcaggtaccggtccggaattcccgggtcgacccacgcgtccgggcggaggtgcaggtcctggtgcttgatggtcgaggccatctcctgggccgcctggcggccatcgtggctaaacaggtactgctgggccggaaggtggtggtcgtacgctgtgaaggcatcaacatttctggcaatttctacagaaacaagttgaagtacctggctttcctccgcaagcggatgaacaccaacccttcccgaggcccctaccacttccgggcccccagccgcatcttctggcggaccgtgcgaggtatgctgccccacaaaaccaagcgaggccaggccgctctggaccgtctcaaggtgtttgacggcatcccaccgccctacgacaagaaaaagcggatggtggttcctgctgccctcaaggtcgtgcgtctgaagcctacaagaaagtttgcctatctggggcgcctggctcacgaggttggctggaagtaccaggcagtgacaggcaccctggaggagaagaggaaagagaaagccaagatccactaccggaagaagaaacagctcatgaggctacggaaacaggccgagaagaacgtggagaagaaaattgacaaatacacagaggtccttaagacccacggacttctggnctgagcccaataaagactggtaantncttaaaaaaaaann

SEQ ID NO: 2059 - DNA, 156 bp, Homo sapiens
  misc_feature (6)..(6): n equals a,t,g, or c
  misc_feature (11)..(11): n equals a,t,g, or c
  misc_feature (25)..(25): n equals a,t,g, or c
  misc_feature (29)..(29): n equals a,t,g, or c
  misc_feature (65)..(65): n equals a,t,g, or c
  misc_feature (116)..(116): n equals a,t,g, or c
  misc_feature (126)..(126): n equals a,t,g, or c
  misc_feature (131)..(131): n equals a,t,g, or c
  misc_feature (153)..(153): n equals a,t,g, or c
ctgtcnttccngaaatcactaagangaanaatgtcacgagacactgcagtacagataccgggtcnagatcaacatgtgagaaacttctgtcgagtacgacacccacaacatgttgntaactgtganagcancgcaccatgtatttgcagctanaag

SEQ ID NO: 2060 - DNA, 676 bp, Homo sapiens
  misc_feature (21)..(21): n equals a,t,g, or c
  misc_feature (28)..(28): n equals a,t,g, or c
  misc_feature (34)..(34): n equals a,t,g, or c
  misc_feature (54)..(54): n equals a,t,g, or c
  misc_feature (103)..(103): n equals a,t,g, or c
  misc_feature (423)..(423): n equals a,t,g, or c
  misc_feature (473)..(473): n equals a,t,g, or c
  misc_feature (490)..(490): n equals a,t,g, or c
  misc_feature (533)..(533): n equals a,t,g, or c
  misc_feature (539)..(539): n equals a,t,g, or c
  misc_feature (561)..(561): n equals a,t,g, or c
  misc_feature (572)..(572): n equals a,t,g, or c
  misc_feature (593)..(593): n equals a,t,g, or c
  misc_feature (629)..(629): n equals a,t,g, or c
  misc_feature (657)..(657): n equals a,t,g, or c
  misc_feature (664)..(665): n equals a,t,g, or c
ggaaacggggggggataaagngaaagcntctagntggaattcccgcaggtaccngtccggaattcccgggtcgacccacgcgtccggctagcattgcttgttngaggcagaaaccagaatatgctgccacattatttaagactgataattgctgctagatttttttaagaggtgttctctgatttttaaaaatagaaattaaaatttaatatttttgcaggtatctgatggtataattgccccaggatatgaagaagaagccttgacaatactttccaaaaagaaaaatggaaactattgtgtccttcagatggaccaatcttacaaaccagatgaaaatgaagttcgaactctctttggtcttcatttaagccagaagagaaataatggtgtcgtcgacaagtcattatttagcaatgctgntaccaaaaataaagatttgccagagtctgcctccgagacctcatcgtagncaccattgctgtcaagnacactcagtctaactctgggtgctacgccaagaacgggcaggntatcgncattggagcaggacagcagctnggatacactgnactcgccttgcaggagataanggcaactattgggggcttaaacaccattcacaaagnggtttcgatgaagtttaaacaggagtgnagagagnngaaatctccaa

SEQ ID NO: 2061 - DNA, 675 bp, Homo sapiens
  misc_feature (4)..(4): n equals a,t,g, or c
  misc_feature (29)..(29): n equals a,t,g, or c
  misc_feature (31)..(31): n equals a,t,g, or c
  misc_feature (55)..(55): n equals a,t,g, or c
  misc_feature (92)..(92): n equals a,t,g, or c
  misc_feature (114)..(114): n equals a,t,g, or c
  misc_feature (130)..(130): n equals a,t,g, or c
  misc_feature (135)..(135): n equals a,t,g, or c
  misc_feature (142)..(142): n equals a,t,g, or c
  misc_feature (160)..(160): n equals a,t,g, or c
  misc_feature (188)..(188): n equals a,t,g, or c
  misc_feature (201)..(201): n equals a,t,g, or c
  misc_feature (210)..(210): n equals a,t,g, or c
  misc_feature (223)..(223): n equals a,t,g, or c
  misc_feature (237)..(237): n equals a,t,g, or c
  misc_feature (272)..(272): n equals a,t,g, or c
  misc_feature (275)..(275): n equals a,t,g, or c
  misc_feature (280)..(280): n equals a,t,g, or c
  misc_feature (294)..(294): n equals a,t,g, or c
  misc_feature (296)..(296): n equals a,t,g, or c
  misc_feature (305)..(305): n equals a,t,g, or c
  misc_feature (310)..(310): n equals a,t,g, or c
  misc_feature (329)..(329): n equals a,t,g, or c
  misc_feature (335)..(335): n equals a,t,g, or c
  misc_feature (358)..(358): n equals a,t,g, or c
  misc_feature (377)..(377): n equals a,t,g, or c
  misc_feature (382)..(382): n equals a,t,g, or c
  misc_feature (412)..(412): n equals a,t,g, or c
  misc_feature (429)..(429): n equals a,t,g, or c
  misc_feature (460)..(460): n equals a,t,g, or c
  misc_feature (497)..(497): n equals a,t,g, or c
  misc_feature (503)..(503): n equals a,t,g, or c
  misc_feature (534)..(534): n equals a,t,g, or c
  misc_feature (547)..(547): n equals a,t,g, or c
  misc_feature (565)..(565): n equals a,t,g, or c
  misc_feature (579)..(579): n equals a,t,g, or c
  misc_feature (582)..(582): n equals a,t,g, or c
  misc_feature (612)..(612): n equals a,t,g, or c
  misc_feature (643)..(643): n equals a,t,g, or c
  misc_feature (671)..(671): n equals a,t,g, or c
cggncgcttggagaagatggtgctgcggngnctgctggccgccctgctgcacagnccgcagctggtggaacagactgtcatgagtcgaggcntatcctacgtgcgacgcagctnacggcctttgcactgntgcangcccagntgcggggccaggacgcgncccgtcgcctgcaggacctcgcggttgngcccgtgggctcnctgtgccgncgcgctgagcganttatagacgccttnacccaggagctacgccgcggactccgaggccgctnggngccancaccaggtagccananggaccctgncgcanacatttaatcctgggctgngcggtnccgaggccgcttgcttttccttncgggctctacagtggcatnaatgnggaggggtcattccgggcactgcgcgcggnttcgaatcccgactggnattgttggcctgcagacatcccacgcataanagcctaggccagaccgcccgctccgttgaagtcttgngattgnacaagacacagtgtggagaaagacccctaancctaacatagatnaaggtaggctgggtccanacacggcacctacnganagccacggaccgaaaccagagaagcctttnctctgcaaatgggaactgaaactcttgacanaagcttgctcaatcttgaattgggaatnagca

SEQ ID NO: 2062 - DNA, 761 bp, Homo sapiens
  misc_feature (560)..(560): n equals a,t,g, or c
  misc_feature (610)..(610): n equals a,t,g, or c
  misc_feature (689)..(689): n equals a,t,g, or c
  misc_feature (730)..(730): n equals a,t,g, or c
  misc_feature (740)..(740): n equals a,t,g, or c
  misc_feature (748)..(748): n equals a,t,g, or c
gggaggtctcactgagaaccatcccagtaacccgaccgccgctggtcttcgctggacaccatgaatcacactgtccaaaccttcttctctcctgtcaacagtggccagccccccaactatgagatgctcaaggaggagcacgaggtggctgtgctgggggcgccccacaaccctgctcccccgacgtccaccgtgatccacatccgcagcgagacctccgtgcccgaccatgtcgtctggtccctgttcaacaccctcttcatgaacccctgctgcctgggcttcatagcattcgcctactccgtgaagtctagggacaggaagatggttggcgacgtgaccggggcccaggcctatgcctccaccgccaagtgcctgaacatctgggccctgattctgggcatcctcatgaccattctgctcatcgtcatcccagtgctgatcttccaggcctatggatagatcaggaggcatcactgaggccaggagctctgcccatgacctgtatcccacgtactccaacttccattcctcgccctgcccccggagccgagtcctgnatcaagccctttatcctcacacgcttttctacaatggcattcaataaagngcacgtggttcttggtaaaaaaaaaaaaaaagggcggccgtttagaggatccaaggttacgacgccgtgcatgcaaggnataagtcttctataggggacctaaattaattaatggccgcngttaaaacgnggactggnaaaccctggggta

SEQ ID NO: 2063 - DNA, 719 bp, Homo sapiens
  misc_feature (1)..(1): n equals a,t,g, or c
  misc_feature (12)..(12): n equals a,t,g, or c
  misc_feature (14)..(14): n equals a,t,g, or c
  misc_feature (526)..(526): n equals a,t,g, or c
  misc_feature (614)..(614): n equals a,t,g, or c
  misc_feature (636)..(636): n equals a,t,g, or c
  misc_feature (647)..(647): n equals a,t,g, or c
  misc_feature (694)..(694): n equals a,t,g, or c
  misc_feature (714)..(714): n equals a,t,g, or c
  misc_feature (718)..(718): n equals a,t,g, or c
ngggaaagctgntntctgaaatcttaatgcagaattgggatgcagccatggaagaccttacacggttaaaagagaccatagataataattctgtgagttctccacttcagtctcttcagcagagaacatggctcattcactggtctctgtttgttttcttcaatcaccccaaaggtcgcgataatattattgacctcttcctttatcagccacaatatcttaatgcaattcagacaatgtgtccacacattcttcgctatttgactacagcagtcataacaaacaaggatgttcgaaaacgtcggcaggttctaaaagatctaggtaaagtattcaacaggagcttacacatataaagacccaattacagaatttgttgaatgtttatatggtaactttgactttgatggggctcagaaaaagctgagggaatgtgaatcagtgcttgtgaatgacttctttcttggtggcttgtcttgaggatttcattgaaaatgcccgtctcttcatatttgagactttctgncgcatccaccagtggatcagcattaacatgttgcagataaattgaacatgacttcagaagaagcttaaaggtggattggaaatttgantagaatgcaagatggatgccanatgatcttaantaaggcatgggggtatgggaccatgcagcttacctattagcaggggntgaaagaccaaagcctttcntttna

SEQ ID NO: 2064 - DNA, 724 bp, Homo sapiens
  misc_feature (553)..(553): n equals a,t,g, or c
  misc_feature (583)..(583): n equals a,t,g, or c
  misc_feature (720)..(724): n equals a,t,g, or c
gcaccttacccgactggggttggagttcttcgaccagccggcagtccccctggcccgggcatttctgggacaggtcctagtccggcgacttcctaatggcacagaactccgaggccgcatcgtggagaccgaggcatacctggggccagaggatgaagccgcccactcaaggggtggccggcagaccccccgcaaccgaggcatgttcatgaagccggggaccctgtacgtgtacatcatttacggcatgtacttctgcatgaacatctccagccagggggacggggcttgcgtcttgctgcgagcactggagcccctggaaggtctggagaccatgcgtcagcttcgcagcaccctccggaaaggcaccgccagccgtgtcctcaaggaccgcgagctctgcagtggcccctccaagctgtgccaggccctggccatcaacaagagctttgaccagagggacctggcacaggatgaagctgtatggctggagcgtggtcccctggagcccagtgagccggctgtagtggcagcagcccgggtgggcgtcggncatgcaggggagtgggcccggaaacccctncgcttctatgtccggggcaggccctgggtcagtgtggtcgacagagtggctgacaggacacacaggcctgagcaaagggctggccagacagatttttaattgttaaaaccgaataaatggttaattctagaaaaaannnnn

SEQ ID NO: 2065 - DNA, 408 bp, Homo sapiens
  misc_feature (12)..(12): n equals a,t,g, or c
  misc_feature (21)..(21): n equals a,t,g, or c
  misc_feature (23)..(23): n equals a,t,g, or c
  misc_feature (36)..(36): n equals a,t,g, or c
  misc_feature (63)..(63): n equals a,t,g, or c
  misc_feature (142)..(142): n equals a,t,g, or c
  misc_feature (196)..(196): n equals a,t,g, or c
  misc_feature (252)..(252): n equals a,t,g, or c
  misc_feature (295)..(295): n equals a,t,g, or c
  misc_feature (403)..(403): n equals a,t,g, or c
  misc_feature (405)..(408): n equals a,t,g, or c
gacccctgcccnatcccggangngataccaagaacnaggtagctgcctgctgtcaaggcttcntcccagcgcatcgcgtggagtgggagagaatggcagcggagaacaactacaagaccacgctccgtgctgactcgacggnccttcttcctctatagcaagctaccgtgacaagagcaggtggagcaggggaacngtcttccatgctcgtgatgcatgaggctctgcacaacccactacacgccagaagancttccctgccccggtaaatgagtgcacggccgcaagccccgtncccggctctcgcggcgacgagatgcttgcacgtaccccgctacatacttccaggcacccagcatggaaataaagcacccaccactgcctgggaaaaaaaaaaaaaaanannnn

SEQ ID NO: 2066 - DNA, 821 bp, Homo sapiens
  misc_feature (23)..(23): n equals a,t,g, or c
  misc_feature (45)..(45): n equals a,t,g, or c
  misc_feature (55)..(55): n equals a,t,g, or c
  misc_feature (91)..(91): n equals a,t,g, or c
  misc_feature (271)..(271): n equals a,t,g, or c
  misc_feature (421)..(421): n equals a,t,g, or c
  misc_feature (433)..(433): n equals a,t,g, or c
  misc_feature (435)..(435): n equals a,t,g, or c
  misc_feature (473)..(473): n equals a,t,g, or c
  misc_feature (522)..(522): n equals a,t,g, or c
  misc_feature (540)..(540): n equals a,t,g, or c
  misc_feature (583)..(583): n equals a,t,g, or c
  misc_feature (637)..(637): n equals a,t,g, or c
  misc_feature (646)..(646): n equals a,t,g, or c
  misc_feature (661)..(661): n equals a,t,g, or c
  misc_feature (674)..(674): n equals a,t,g, or c
  misc_feature (692)..(692): n equals a,t,g, or c
  misc_feature (725)..(726): n equals a,t,g, or c
  misc_feature (733)..(733): n equals a,t,g, or c
  misc_feature (736)..(736): n equals a,t,g, or c
  misc_feature (738)..(739): n equals a,t,g, or c
  misc_feature (813)..(813): n equals a,t,g, or c
  misc_feature (819)..(819): n equals a,t,g, or c
ctccatcactttctcctggaaanacaagaacaactctgacatcancagcacccgntgcttccatcagtcctgagaggggcaagtacgcagncacctcacaggtgctgctgcttcaaggacgtcatgcagggcacagacgaacacgtggtgtgcaaagtccagcaccccaacggcaacaaagaaaagaacgtgctcttcagtgattgccgagctgctccaaagtgagcggtcttcgtccaccccgcgacggcttcttcggcaacccccgcangtcaagctcatctgcaggccacggtttaagtccccggcagattcaggtgtcctggctgcgcgaggggaagcaggtgggtctggcgtcaccacggaccaaggtgcaggcctgaggcaaagagtctggcccacgacctacaaggtgaccagnacactgaccatnanagagagcgactggctcagccagagccatgttcacctgncgcgtggatacaggggcctgactttcagcataatgcgtcctcatgtggnccccgatcaagacacagncattccggtcttcgcatcccccatcctttgcagcatcttcctnaccaagtccaccaagttgacctgcctggcacagacctgaccacctattacaagngtgaccatnttctggacccggcanaatggcaaactgngaaaaccacaccaacatnttccagagccacccatgcactttaacgcctggnnaagccanatntnnaagatacggaattccggaaagttacggaccgtgccaacaaattgcttgcattaacaacatttccggcaaggggngcctgnaa

SEQ ID NO: 2067 - DNA, 467 bp, Homo sapiens
  misc_feature (8)..(8): n equals a,t,g, or c
  misc_feature (25)..(25): n equals a,t,g, or c
  misc_feature (111)..(111): n equals a,t,g, or c
  misc_feature (430)..(430): n equals a,t,g, or c
  misc_feature (439)..(439): n equals a,t,g, or c
  misc_feature (441)..(441): n equals a,t,g, or c
  misc_feature (446)..(446): n equals a,t,g, or c
  misc_feature (459)..(459): n equals a,t,g, or c
gtcgagtnacggatttgtcgattgngcgctgtcaccaggctgttttactctgtaaagtgatattgttgcatcaatgaccccttcattgacctcactacatggttacatgtncaatatgattcacccatggcaaattcatggcaccgtcaaggctgagaacgggaagcttgcatcaatggaaatccatcaccatcttccaggagcgagatcctccaaatcaagtggggcgatgctgcgctgatacgtcgtgaagtccactgccgtcttcaccaccatggagaaggctggggctaattgcagggggaagcaaaaggtcatcatctctgcccctctgtgatgcccccatgtcgcatggtgtaaccatgagaagatacacagctaagatatagcaatgctctgaccacaactgtacaccctggcaggcatcatncacttggangngaagntatgcacagcatncttactgc

SEQ ID NO: 2068 - DNA, 595 bp, Homo sapiens
  misc_feature (460)..(460): n equals a,t,g, or c
gaaaattattctgccctccttaatttgggaaggtttgtgttttctctggaatggtacatgtcttccatgtatcttttgaactggcaattgtctatttatcttttatttttttaagtcagtatggtctaacactggcatgttcaaagccacattatttctagtccaaaattacaagtaatcaagggtcattatgggttaggcattaatgtttctatctgattttgtgcaaaagcttcaaattaaaacagctgcattagaaaaagaggcgcttctcccctcccctacacctaaaggtgtatttaaactatcttgtgtgattaacttatttagagatgctgtaacttaaaataggggatatttaaggtagcttcagctagcttttaggaaaatcactttgtctaactcagaattatttttaaaaagaaatctggtcttggtagaaaacaaaattttattttgngctcatttaagtttcaaacttactattttgacaggtattttgataacaatgacctagaaaacttgacttcatttcatcattggttctgcatgaatatcatacaaatcagttagttttagtcaaggcttactattt

SEQ ID NO: 2069 - DNA, 550 bp, Homo sapiens
  misc_feature (7)..(7): n equals a,t,g, or c
  misc_feature (36)..(36): n equals a,t,g, or c
  misc_feature (270)..(270): n equals a,t,g, or c
  misc_feature (330)..(330): n equals a,t,g, or c
  misc_feature (354)..(354): n equals a,t,g, or c
  misc_feature (390)..(390): n equals a,t,g, or c
  misc_feature (498)..(498): n equals a,t,g, or c
  misc_feature (525)..(525): n equals a,t,g, or c
  misc_feature (537)..(537): n equals a,t,g, or c
  misc_feature (544)..(544): n equals a,t,g, or c
  misc_feature (550)..(550): n equals a,t,g, or c
ggtcttntgcctggccgccgccgcctatgagctacnaggaggagctttacgaccttcccgtcctgcgggaagcgacgggcacgatcgcaaggtagcgcagaagcttctcaatggccagcgccagctgcagccccggcggcgcactcgcctcatctgagcctgggaggaaaattcttccaaggatgatctcccactcagagctgaggaagcttttctacttcacccatgctgtgtgttttgatgttgacagcacggtcatcagtgaagaangaatcggatgctttcattggctttggaggaaatgtgatcaggcaacaagtcaaggatcangccaaatggtatatcactgatttngtagagctgctgggagaaccggaagaataacatccnttgtcatacagcttcaaacaacttcagatgaatttttacattgttcacagattgatactgtttgcatacaattgcctattacaacttgctataccaaaggtggcacanacaatctgcactgtcaagtaaactacncgtaggaatccntcaaaanaaaagn

SEQ ID NO: 2070 - DNA, 752 bp, Homo sapiens
  misc_feature (67)..(67): n equals a,t,g, or c
  misc_feature (265)..(265): n equals a,t,g, or c
  misc_feature (356)..(356): n equals a,t,g, or c
  misc_feature (436)..(436): n equals a,t,g, or c
  misc_feature (459)..(459): n equals a,t,g, or c
  misc_feature (527)..(527): n equals a,t,g, or c
  misc_feature (627)..(627): n equals a,t,g, or c
  misc_feature (671)..(671): n equals a,t,g, or c
  misc_feature (694)..(694): n equals a,t,g, or c
  misc_feature (702)..(702): n equals a,t,g, or c
  misc_feature (749)..(750): n equals a,t,g, or c
gaaccgcctgcgaaacccaagccgccgcgtaggagcgtgcgttcgggccctcttctcccacctgttnggccagcctccacgatccagctgccaaccatctagcctaccctgatctctgagcaggggtcgtcgtcattttactccagaggagactgaagccaaaagactccccatccccaggatgtcaacctcagttccctcaaggccaatacctggatccattgggtgaagaaagacgatgaggaggaggacccgatggaccagnctgatctcccgctctggctgtgctgcctcccactttgcagtgcaggagtgcatggcccagcaccaggactggcggcaatgccagctacagntgcaggcgttcaaggattgcatgagtgaacgagcacagccgaggcggcaagaggagctgcagaggaggcaagaacaagcnggtgcccaccactgagaccccanaccacctatccccagtagatggccctgccaagaccagcacccagcaaagattatagaggaagaaatcntaaatgctggtgtgggaggtctaaaacatggggagagtttttggatctggagttgagaaccatggggtttggacattgactggcacaaacagctggcttntgtttattgttcagatgtcatacattcttagcttgaattgttcnccagtattttaccaaggaaaacnaagaatgnggttaaggggaatggcttcccccaaccccacaatttttaaagtcaanngg

SEQ ID NO: 2071 - DNA, 247 bp, Homo sapiens
  misc_feature (8)..(8): n equals a,t,g, or c
  misc_feature (16)..(17): n equals a,t,g, or c
  misc_feature (57)..(57): n equals a,t,g, or c
  misc_feature (66)..(66): n equals a,t,g, or c
  misc_feature (115)..(115): n equals a,t,g, or c
  misc_feature (175)..(175): n equals a,t,g, or c
  misc_feature (220)..(220): n equals a,t,g, or c
  misc_feature (226)..(226): n equals a,t,g, or c
  misc_feature (229)..(229): n equals a,t,g, or c
  misc_feature (231)..(231): n equals a,t,g, or c
gaattacncctgcagnnaccggtccggaattcccgggtcgacccacgcgtccgctanttgaccctnatgatctgcaatgtaagcggggagaacatgttgcgctggctaactggcngaaccacgcatccctacggttgttgaatctagtctatgatgtgactcccccagagcttgnggatctggtgatcacggagctggggatgatcccttgcagttctgnacctgntgntntacgagtcaagagcag

SEQ ID NO: 2072 - DNA, 572 bp, Homo sapiens
  misc_feature (14)..(15): n equals a,t,g, or c
  misc_feature (293)..(293): n equals a,t,g, or c
  misc_feature (373)..(373): n equals a,t,g, or c
  misc_feature (409)..(410): n equals a,t,g, or c
  misc_feature (412)..(412): n equals a,t,g, or c
  misc_feature (424)..(425): n equals a,t,g, or c
  misc_feature (429)..(429): n equals a,t,g, or c
  misc_feature (435)..(435): n equals a,t,g, or c
  misc_feature (446)..(446): n equals a,t,g, or c
  misc_feature (451)..(451): n equals a,t,g, or c
  misc_feature (465)..(465): n equals a,t,g, or c
  misc_feature (468)..(468): n equals a,t,g, or c
  misc_feature (470)..(470): n equals a,t,g, or c
  misc_feature (495)..(495): n equals a,t,g, or c
  misc_feature (509)..(509): n equals a,t,g, or c
  misc_feature (513)..(513): n equals a,t,g, or c
  misc_feature (528)..(528): n equals a,t,g, or c
  misc_feature (569)..(569): n equals a,t,g, or c
ggcagaatggctcnngcaaagaaggttggcagagaagaaaaagggccgttctgccatcaacgaagtggtaacccgagaatacaccatcaacattcacaagcgcatccatggagtgggcttcaagaagcgtgcacctcgggcactcaaagagattcggaaatttgccatgaaggagatgggaactccagatgtgcgcattgacaccaggctcaacaaagctgtctgggccaaaggaataaggaatgtgccataccgaatccgtgtgcggttgtccagaaaacgtaatgaggatnaagattcacccaaataagctatatactttggttacctatggacctggtaccactttcaaaaatctacagacagtcaatgnggatgaaaactaatcgctgatcgtccaatcatatanngntatgaaattgcnntctntacagnaagcttaccgnggacnaaaaaaagggcggncgntntaaaggatccaggcttacgtacgcngccttgcgatgtcntagntctttttataggggnaacctaaatttaaattgacttggccgtcgttttacaaccgncgg

SEQ ID NO: 2073 - DNA, 797 bp, Homo sapiens
  misc_feature (515)..(515): n equals a,t,g, or c
  misc_feature (687)..(687): n equals a,t,g, or c
  misc_feature (703)..(703): n equals a,t,g, or c
  misc_feature (722)..(722): n equals a,t,g, or c
  misc_feature (726)..(726): n equals a,t,g, or c
  misc_feature (733)..(733): n equals a,t,g, or c
  misc_feature (767)..(767): n equals a,t,g, or c
gcggacgcgtgggcggttctcctggacagtcagtcaccatctcctgcactgggaccaccactgatgttggttcttctaattatgtcttctggtatcagcaacacccaggcaaagcccccagactcatcatttatgatgtcactaagcggccctcaggggtccctgatcgcttctctggctccaggtctggcaacacagcctccctgaccatctctgggctccaggctgaggatgaggctgattatcactgctcctcatatgcaggcagttattttcttcttttcggcggagggacccagttgaccgtcctgggtcagcccaaggctgccccctcggtcactctgttctcgccctcctctgaggagcttcaagccaacaaggccacactggtgtgtctcataagtgacttctacccgggagccgtgacagtggcctggaaggcagatagcagccccgtcaaggcgggagtggagaccaccacacccttcaaacaaagcaacaacaagtacgccggncagcaagctatctgagcctgacgcctgagcaagtggaagtcccacaagaagctacaggtggcaggtcaacgcatgaagggagcaccgtggagaagacagtgggccctacagaatggtcatagggtcttaaccttaacccccaaccacggggagacctagagctgcagggatnccaaggggagggggcntttcttccaaccccaaggnattnaagcccntttttccttggactcaataaaaccctcaataaanaattctcaattgggcaaatcggaaaaaaaa

SEQ ID NO: 2074 - DNA, 648 bp, Homo sapiens
  misc_feature (440)..(440): n equals a,t,g, or c
  misc_feature (452)..(452): n equals a,t,g, or c
  misc_feature (467)..(467): n equals a,t,g, or c
  misc_feature (484)..(484): n equals a,t,g, or c
  misc_feature (499)..(500): n equals a,t,g, or c
  misc_feature (517)..(517): n equals a,t,g, or c
  misc_feature (535)..(535): n equals a,t,g, or c
  misc_feature (544)..(545): n equals a,t,g, or c
  misc_feature (563)..(563): n equals a,t,g, or c
  misc_feature (578)..(578): n equals a,t,g, or c
  misc_feature (592)..(592): n equals a,t,g, or c
  misc_feature (601)..(601): n equals a,t,g, or c
  misc_feature (641)..(641): n equals a,t,g, or c
catgttcgtaggcattggcttggaacctttgggctgatttatgtgcttggttgcgtcgtcgggcctcgagttggagcggctggcgggcgggacggaggtgattccggagtagtatccggaagatataacgaagaactttcttaccgccggagcttcgcgtatagacctataaggatccaactcgggccgttgtgggatttcgctagacgagtacgtcggagcgacactcgcctcagtttagtaagtagtcaagtcaattctcgattttatcgacaccttcgcggcgcgctcagaactagacaacgggaataccacgacttagaaatatgacggtactatggcggtagcgtataaaacggttctccgacgtctacactcgcctcctagtagttcgtacaggaatcggacttcattcacggcaaacattccacggatcatcnaaggccctaggnagccaggttacctanccaacgggtaccaagtntcccctcgccaaccnngagtaaccgccctcaangctcacgattgtcactangacacacannaaggacacgcccgaatanaggctaggttcccgncacagaaccctcgnactacaaancgcccgaggaaacgaaaaaaaaaaaaaaaaaaaggggttncccaagg

SEQ ID NO: 2075 - DNA, 798 bp, Homo sapiens
  misc_feature (3)..(3): n equals a,t,g, or c
  misc_feature (6)..(6): n equals a,t,g, or c
  misc_feature (28)..(28): n equals a,t,g, or c
  misc_feature (62)..(62): n equals a,t,g, or c
  misc_feature (147)..(147): n equals a,t,g, or c
  misc_feature (180)..(180): n equals a,t,g, or c
  misc_feature (234)..(234): n equals a,t,g, or c
  misc_feature (259)..(259): n equals a,t,g, or c
  misc_feature (336)..(336): n equals a,t,g, or c
  misc_feature (360)..(360): n equals a,t,g, or c
  misc_feature (436)..(437): n equals a,t,g, or c
  misc_feature (461)..(462): n equals a,t,g, or c
  misc_feature (515)..(515): n equals a,t,g, or c
  misc_feature (522)..(522): n equals a,t,g, or c
  misc_feature (529)..(529): n equals a,t,g, or c
  misc_feature (534)..(534): n equals a,t,g, or c
  misc_feature (558)..(558): n equals a,t,g, or c
  misc_feature (580)..(580): n equals a,t,g, or c
  misc_feature (596)..(596): n equals a,t,g, or c
  misc_feature (603)..(603): n equals a,t,g, or c
  misc_feature (645)..(645): n equals a,t,g, or c
  misc_feature (650)..(650): n equals a,t,g, or c
  misc_feature (663)..(664): n equals a,t,g, or c
  misc_feature (669)..(669): n equals a,t,g, or c
  misc_feature (672)..(672): n equals a,t,g, or c
  misc_feature (678)..(678): n equals a,t,g, or c
  misc_feature (694)..(694): n equals a,t,g, or c
  misc_feature (697)..(697): n equals a,t,g, or c
  misc_feature (700)..(700): n equals a,t,g, or c
  misc_feature (707)..(709): n equals a,t,g, or c
  misc_feature (712)..(712): n equals a,t,g, or c
  misc_feature (724)..(724): n equals a,t,g, or c
  misc_feature (762)..(762): n equals a,t,g, or c
  misc_feature (767)..(767): n equals a,t,g, or c
  misc_feature (771)..(771): n equals a,t,g, or c
  misc_feature (773)..(774): n equals a,t,g, or c
  misc_feature (778)..(778): n equals a,t,g, or c
ganagngcgggttgaattttcttgtcgnttcctatcaaaatattcagagactcgagcacagnacccagacttcatgcgcccgtggaatgctcaccacatgttggtcgaagcggccgaccactgactttgtgacttaggcggctgtgntgcctatgtagagaacacgcttcacccccactncccgtacagtgcgcacaggctttatcgagaataggaaaacctttaaaccccggncatccggacatcccaacgcatgctnctggagctcacagccttctgtggtgtcatttctgaaacaagggcgtggatccctcaaccaagaagaatgtttatgtnttcaagtgacctgtactgcttggngactattggagaaaataaggtggagtcctacttggttaaaaaaatatgtatctaagaatggtctaaggcactctgnnaacctataaaggcaggtatttcgnncctcctcttcaggaatcttcctgatgacatggccagccgaaggcccaggatgntttttgnttgcggncccgngggggtaggaaggggacagagagncagggaagagtcaagccttcanaattcagagggcattnacaaggnaatggggaccaatttctttggggatggacttgccggaaaaanttagnggggttttggaanntttcnaancaaacntcaagggaaccaaaangcnttnaaatttnnnggnggggataaaagnctcccttttaaaaggggcaaaaggccttttaaattttnaaaancccntnnaaanctttttggggcccttccttt

SEQ ID NO: 2076 - DNA, 408 bp, Homo sapiens
  misc_feature (182)..(182): n equals a,t,g, or c
  misc_feature (253)..(253): n equals a,t,g, or c
  misc_feature (271)..(271): n equals a,t,g, or c
  misc_feature (289)..(289): n equals a,t,g, or c
  misc_feature (301)..(301): n equals a,t,g, or c
  misc_feature (307)..(307): n equals a,t,g, or c
  misc_feature (384)..(384): n equals a,t,g, or c
  misc_feature (399)..(399): n equals a,t,g, or c
  misc_feature (406)..(408): n equals a,t,g, or c
gggcacttgatgtgatgtggcaggagggcagtggtggagctggacctgcctgctgcagtcacgtgtaaacaggattattattagtgttttatgcatgtaatggactatgcacacttttaattttgtcagattcacacatgccactatgagctttcagactccagctgtgaagagactctgtntgcttgtgtttgttatgtttgcagtctctctctgccatggccttggcaaggctgctggaaaggcagcttgntgaggccgttggttccgnccactcattccttctcgngcactggtttcncctttncagcttagatgccatgtgcagggtggattccatggcggaaacatgaaataaaagcttttgcaaaaggcacgaagcanaaaaaaatggagaanaaaaaannn

SEQ ID NO: 2077 - DNA, 789 bp, Homo sapiens
  misc_feature (625)..(625): n equals a,t,g, or c
  misc_feature (700)..(700): n equals a,t,g, or c
gcaagaacaagcgccttacgaaaggcggcaaaaagggagccaagaagaaagtggttgatccattttctaagaaagattggtatgatgtgaaagcacctgctatgttcaatataagaaatattggaaagacgctcgtcaccaggacccaaggaaccaaaattgcatctgatggtctcaagggtcgtgtgtttgaagtgagtcttgctgatttgcagaatgatgaagttgcatttagaaaattcaagctgattactgaagatgttcagggtaaaaactgcctgactaacttccatggcatggatcttacccgtgacaaaatgtgttccatggtcaaaaaatggcagacaatgattgaagctcacgttgatgtcaagactaccgatggttacttgcttcgtctgttctgtgttggttttactaaaaaacgcaacaatcagatacggaagacctcttatgctcagcaccaacaggtccgccaaatccggaagaagatgatggaaatcatgacccgagaggtgcagacaaatgacttgaaagaagtggtcaataaattgattccagacagcattggaaaagacatagaaaaggcttgccaatctatttatcctcttcatgatgtcttcgntagaaaagtaaaaatgctgaagaagcccaagtttgaattgggaaagctcatggagctttatggtgaaggcagtanttctggaaaagcccttgggacgagacaggtgcttaaggttgaacgactgatggatatgaaccaccagtcccaagaaactggttaaagtt

SEQ ID NO: 2078 - DNA, 732 bp, Homo sapiens
  misc_feature (226)..(226): n equals a,t,g, or c
  misc_feature (228)..(228): n equals a,t,g, or c
  misc_feature (231)..(231): n equals a,t,g, or c
  misc_feature (267)..(267): n equals a,t,g, or c
  misc_feature (272)..(272): n equals a,t,g, or c
  misc_feature (288)..(288): n equals a,t,g, or c
  misc_feature (300)..(300): n equals a,t,g, or c
  misc_feature (307)..(307): n equals a,t,g, or c
  misc_feature (347)..(347): n equals a,t,g, or c
  misc_feature (362)..(362): n equals a,t,g, or c
  misc_feature (364)..(364): n equals a,t,g, or c
  misc_feature (367)..(367): n equals a,t,g, or c
  misc_feature (383)..(383): n equals a,t,g, or c
  misc_feature (403)..(403): n equals a,t,g, or c
  misc_feature (406)..(406): n equals a,t,g, or c
  misc_feature (435)..(435): n equals a,t,g, or c
  misc_feature (450)..(450): n equals a,t,g, or c
  misc_feature (457)..(457): n equals a,t,g, or c
  misc_feature (475)..(475): n equals a,t,g, or c
  misc_feature (478)..(478): n equals a,t,g, or c
  misc_feature (492)..(492): n equals a,t,g, or c
  misc_feature (507)..(507): n equals a,t,g, or c
  misc_feature (512)..(513): n equals a,t,g, or c
  misc_feature (524)..(524): n equals a,t,g, or c
  misc_feature (528)..(528): n equals a,t,g, or c
  misc_feature (532)..(532): n equals a,t,g, or c
  misc_feature (552)..(553): n equals a,t,g, or c
  misc_feature (560)..(561): n equals a,t,g, or c
  misc_feature (575)..(575): n equals a,t,g, or c
  misc_feature (578)..(578): n equals a,t,g, or c
  misc_feature (594)..(594): n equals a,t,g, or c
  misc_feature (608)..(608): n equals a,t,g, or c
  misc_feature (613)..(613): n equals a,t,g, or c
  misc_feature (621)..(621): n equals a,t,g, or c
  misc_feature (624)..(624): n equals a,t,g, or c
  misc_feature (629)..(629): n equals a,t,g, or c
  misc_feature (633)..(633): n equals a,t,g, or c
  misc_feature (636)..(636): n equals a,t,g, or c
  misc_feature (645)..(645): n equals a,t,g, or c
  misc_feature (663)..(663): n equals a,t,g, or c
  misc_feature (729)..(729): n equals a,t,g, or c
  misc_feature (732)..(732): n equals a,t,g, or c
gcctgagctgaaagttctttggcagatgagcaagaaactgaaagctgatgtacctgactggctctgtaagatcagaaaactgtatccagaataagccctatggattaacccctgagtacccagagtaaaaactaatttacagaacttccttattgatctgctggttcttccagatcatattctggctattggtatggctggcctttctgaaggtacctctgcttgncnatnatcctgactaagatcttgcctgcctttttcacatgntgctnctattagactcaccgngaggactaccgncaatttnaggctatcttgtgcccaatacatgaaggatttttaatagnaacaacccacacctnanccnctaggactcaatgttnacaacaggaaggaccattgntgnatactccttgaccagcaacttttttgaanatatttttaagtgcngagtaanccctctattcctggatgnaantgggcattttcagnaacctggaacctcanctatnngggtctggganggantacngcaattcgaaaggccgcggnncaatttnntttctttagtaagnggnccaaaatgagttcccnaatttaaccaggtncaccnccggaacntgnacccngttnaancctaagcanaaaggaaggaaaaggttncactgggaccttaaaaatttacagggttgactcaaaaattgggctcacaagaatttatttggatgnaan

SEQ ID NO: 2079 - DNA, 610 bp, Homo sapiens
  misc_feature (17)..(17): n equals a,t,g, or c
  misc_feature (56)..(56): n equals a,t,g, or c
  misc_feature (411)..(411): n equals a,t,g, or c
  misc_feature (449)..(449): n equals a,t,g, or c
  misc_feature (475)..(475): n equals a,t,g, or c
  misc_feature (507)..(507): n equals a,t,g, or c
  misc_feature (535)..(535): n equals a,t,g, or c
  misc_feature (552)..(552): n equals a,t,g, or c
  misc_feature (601)..(601): n equals a,t,g, or c
  misc_feature (604)..(604): n equals a,t,g, or c
  misc_feature (608)..(608): n equals a,t,g, or c
gcggacgcgtgggttgnaggccgtcattgccgaggctgaggagcgtggggagctgncgctcaaggatgctcgtgccaagcaggaggagctggaagccgccctgcagcgggccaagcaggatatggcacggcagctgagtgagtaccaggaactcatgagcgtgaagctggccctggacatcgagatcgccacctaccgcaagctgctggagggcgaggagagccggttggctggagatggagtgggagccgtgaatatctctgtgatgaattccactggcggaagtagcagtggcggtggcattgggctgaccctagggggaaccatgggcagcaatgccctgagcttctccagtagtgcgggtactggctcctgaaggcttattccatccggaccgcatccgccagtcgnaggagtgcccgcgactgagccgctaccacactccactnatccagccaccacctacaatcacaanaagattcccacccctgcctcccatgcctggtnccaagacagtgagacagtctggaaaagngatgtcagaataagttntccaataaagcaaactcatttttgaaggcctgagtgatcccaaaaaaanaanaaanaa

SEQ ID NO: 2080 - DNA, 772 bp, Homo sapiens
  misc_feature (363)..(363): n equals a,t,g, or c
  misc_feature (401)..(401): n equals a,t,g, or c
  misc_feature (475)..(475): n equals a,t,g, or c
  misc_feature (477)..(477): n equals a,t,g, or c
  misc_feature (490)..(491): n equals a,t,g, or c
  misc_feature (493)..(494): n equals a,t,g, or c
  misc_feature (501)..(501): n equals a,t,g, or c
  misc_feature (570)..(570): n equals a,t,g, or c
  misc_feature (583)..(583): n equals a,t,g, or c
  misc_feature (608)..(608): n equals a,t,g, or c
  misc_feature (627)..(627): n equals a,t,g, or c
  misc_feature (662)..(662): n equals a,t,g, or c
  misc_feature (733)..(733): n equals a,t,g, or c
  misc_feature (760)..(760): n equals a,t,g, or c
  misc_feature (766)..(766): n equals a,t,g, or c
  misc_feature (768)..(768): n equals a,t,g, or c
  misc_feature (770)..(770): n equals a,t,g, or c
gtccctcccgggtcgacccacgcgtccgcaactctggagtcctctgagagagccaccaaggaggagcaggggagcgacggccggggcagaagttgagaccacccagcagaggagctaggccagtccatctgcatttgtcacccaagaactcttaccatgaagaccctcctactgttggcagtgatcatgatctttggcctactgcaggcccatgggaatttggtgaatttccacagaatgatcaagttgacgacaggaaaggaagccgcactcagttatggcttctatggctgccactgtggcgtgggtggcagaggatcccccaaggatgcaacggatcgctgctgtgtcactcatgactgntgctacaaacgtctggagaaacgtggattgtggcaccnaattttttgagcttccaagtttaacaaccttgggggagcagaattcaccctgtgccaaaacaaggactccttgnanaaagtcaactggnntnnaattggngataaaagggtttgtttgccaccctggttttggcttaggaaccaaggacggaccttacaatttaaaaanggtccccaggtancttatttcccaattaaaccacttgnaaaaggggaggcaaccccnttggttggcttgaatccccctttttttcccttggnaaaccctttccaacccaaggggctgaaaatttcccctttttttaataccccttcctttccttacccttaanccaaggtttcctttgggcccattcccnaaaagnantncc

SEQ ID NO: 2081 - DNA, 588 bp, Homo sapiens
  misc_feature (17)..(17): n equals a,t,g, or c
  misc_feature (522)..(522): n equals a,t,g, or c
  misc_feature (544)..(544): n equals a,t,g, or c
  misc_feature (552)..(552): n equals a,t,g, or c
  misc_feature (559)..(559): n equals a,t,g, or c
  misc_feature (562)..(562): n equals a,t,g, or c
gggggggaattcccggntcgacccacgcgtccggaaaagttaaactaaaaaaaaaaaggccgccgtgacctattcaccctccacttcccgtctcagaatctaaacgtggtcaccttcgagtagagaggcccgcccgcccaccgtgggcagtgccacccgcagatgacacgcgctctccaccacccaacccaaaccatgagaatttgcaacaggggaggaaaaaagaaccaaaacttccaaggccctgctttttttcttaaaagtactttaaaaaggaaatttgtttgtattttttatttacattttatatttttgtacatattgttagggtcagccatttttaatgatctcggatgaccaaaccagccttcggagcgttctctgtcctacttctgactttacttgtggtgtgaccatgttcattataatctcaaaggagaaaaaaaaccttgtaaaaaaagcaaaaatgacaacagaaaaacaatcttattccgagcattccagtaacttttttgtgtatgnacttagctgtactataagcagntggtttgnatgaganggntaaaaaggccaaagataaaaggtttc

SEQ ID NO: 2082 - DNA, 737 bp, Homo sapiens
  misc_feature (2)..(3): n equals a,t,g, or c
  misc_feature (7)..(8): n equals a,t,g, or c
  misc_feature (40)..(40): n equals a,t,g, or c
  misc_feature (466)..(468): n equals a,t,g, or c
  misc_feature (473)..(473): n equals a,t,g, or c
  misc_feature (477)..(477): n equals a,t,g, or c
  misc_feature (479)..(480): n equals a,t,g, or c
  misc_feature (491)..(491): n equals a,t,g, or c
  misc_feature (556)..(556): n equals a,t,g, or c
  misc_feature (573)..(573): n equals a,t,g, or c
  misc_feature (660)..(660): n equals a,t,g, or c
  misc_feature (704)..(705): n equals a,t,g, or c
  misc_feature (723)..(723): n equals a,t,g, or c
  misc_feature (729)..(729): n equals a,t,g, or c
gnnccannatgggccgcgttcgcaccaaaaccgtgaaganggcggcccgggtcatcatagaaaagtactacacgcgcctgggcaacgacttccacacgaacaagcgcgtgtgcgaggagatcgccattatccccagcaaaaagctccgcaacaagatagcaggttatgtcacgcatctgatgaagcgaattcagagaggcccagtaagaggtatctccatcaagctgcaggaggaggagagagaaaggagagacaattatgttcctgaggtctcagccttggatcaggagattattgaagtagatcctgacactaaggaaatgctgaagcttttggacttcggcagtctgtccaaccttcaggtcactcagcctacagttgggatgaatttcaaaacgcctcggggacctgtttgaattttttctgtagtgctgtattattttcaataaatctgggacaacagcannnccaanaaanannaaaaaaaaggncggccgctctagaggatccaagcttacgtacgcgtgcatgcgacgtcatagctcttctatagtgncacctaaattcaattcnctggccgtcgttttacaacgtcgggactgggaaaaccctgggcgttacccaacttaatcgcttgcagcacatccccctttcgccagntggcggaataaccaacaggcccgcaccgatcggccttcccacannttgcgcagcccggatggnggaatngggacccc

SEQ ID NO: 2083 - DNA, 655 bp, Homo sapiens
  misc_feature (292)..(292): n equals a,t,g, or c
  misc_feature (301)..(301): n equals a,t,g, or c
  misc_feature (341)..(341): n equals a,t,g, or c
  misc_feature (424)..(424): n equals a,t,g, or c
  misc_feature (462)..(462): n equals a,t,g, or c
  misc_feature (469)..(469): n equals a,t,g, or c
  misc_feature (485)..(485): n equals a,t,g, or c
  misc_feature (531)..(531): n equals a,t,g, or c
  misc_feature (540)..(540): n equals a,t,g, or c
  misc_feature (568)..(568): n equals a,t,g, or c
  misc_feature (578)..(578): n equals a,t,g, or c
  misc_feature (611)..(611): n equals a,t,g, or c
gcgaagatggcggaggtgcaggtcctggtgcttgatggtcgaggccatctcctgggccgcctggcggccatcgtggctaaacaggtactgctgggccggaaggtggtggtcgtacgctgtgaaggcatcaacatttctggcaatttctacagaaacaagttgaagtacctggctttcctccgcaagcggatgaacaccaacccttcccgaggcccctaccacttccgggcccccagccgcatcttctggcggaccgtgcgaggtatgctgccccacaaaaccaaagcgaggnccaggccgntcttgaaccgtctcaaaggtgtttgacggcatcccaccgncctacgacaagaaaaagcggatggtggttcctgctgccctcaaggtcgtgcgtctgaagcctacaagaaagtttgctatcttnggcgcctggctcacgaggttgctggaagtaccaagcantgacagncaccctggaggagaanaggaaagagaaagcaagatccactaccggaagaagaaacagctcangaagctacngaaacagggcgagaagaacgtggagaanaaaattgacnaatcccaaaggtccttaagaaccacggattctnggctgagccaataaagaatgtaattcctcaaaaaaaataaaaaa

SEQ ID NO: 2084 - DNA, 793 bp, Homo sapiens
  misc_feature (8)..(9): n equals a,t,g, or c
  misc_feature (13)..(13): n equals a,t,g, or c
  misc_feature (539)..(539): n equals a,t,g, or c
  misc_feature (603)..(603): n equals a,t,g, or c
  misc_feature (630)..(630): n equals a,t,g, or c
  misc_feature (657)..(657): n equals a,t,g, or c
  misc_feature (662)..(662): n equals a,t,g, or c
  misc_feature (673)..(673): n equals a,t,g, or c
  misc_feature (701)..(701): n equals a,t,g, or c
  misc_feature (767)..(767): n equals a,t,g, or c
  misc_feature (787)..(787): n equals a,t,g, or c
ggcttccnnctcntccctggagaagagctacgagctgcctgacggccaggtcatcaccattggcaatgagcggttccgctgccctgaggcactcttccagccttccttcctgggcatggagtcctgtggcatccacgaaactaccttcaactccatcatgaagtgtgacgtggacatccgcaaagacctgtacgccaacacagtgctgtctggcggcaccaccatgtaccctggcattgccgacaggatgcagaaggagatcactgccctggcacccagcacaatgaagatcaagatcattgctcctcctgagcgcaagtactccgtgtggatcggcggctccatcctggcctcgctgtccaccttccagcagatgtggatcagcaagcaggagtatgacgagtccggcccctccatcgtccaccgcaaatgcttctaggcggactatgacttagttgcgttacaccctttcttgacaaaacctaacttgcgcagaaaacaaagatgagattggcatggctttatttggttttttttgntttggtttggttttttttttttttttggcttgactcaggatttaaaaactggaacggcgaaggngacaggcagtcggtttggagcgagcantccccaaaggttcacaatggggggccnggggncttttgattgncccattgggtggtttttttaataaggcnattccaaataattgaagatggcggttgttaccagggaagtcccccttgccattccttaaaaagccnccccacctttttcttttaanggaaaa

SEQ ID NO: 2085 - DNA, 641 bp, Homo sapiens
  misc_feature (357)..(357): n equals a,t,g, or c
  misc_feature (474)..(474): n equals a,t,g, or c
  misc_feature (488)..(488): n equals a,t,g, or c
  misc_feature (503)..(503): n equals a,t,g, or c
  misc_feature (575)..(575): n equals a,t,g, or c
  misc_feature (594)..(594): n equals a,t,g, or c
  misc_feature (597)..(597): n equals a,t,g, or c
  misc_feature (623)..(623): n equals a,t,g, or c
  misc_feature (630)..(630): n equals a,t,g, or c
gcgtcagtgagctgctggaaactctggcccagctgcgggaggaccggcaagtgcgtgtcctgctcttcagaagtggagtgaagggcgtgttctgtgcaggtgcagacctgaaggagcgggaacagatgagtgaagcagaggtgggggtgtttgtccagcgactccggggcctgatgaatgacatcggtgaggatctgggtgtggggtggaggagggggtttgggggtccctgccgatgacagtcccgctacccccaccagcatctaaggagagtcttctttctgtttggagttctgtgataagacagatgactcacccagggggatggaggaggatgaccgagggcagttctctcanagagggagttctggctcttcagcttttgtgtcccgccccaccctcagggttcaagcctggccattccaaagcagttaagtttccccaagcatgctttcaagttttgacaattgctgntacctttgcctganataccccttcttggntacttgaacttttacttgccttcaagcccttcagtaccttctccttcaggaagccttccaacccaccctctnactttttattggagcactnatnatcctgggtcaataatgcctgatacncatttgncttccccatga

SEQ ID NO: 2086 - DNA, 258 bp, Homo sapiens
  misc_feature (249)..(249): n equals a,t,g, or c
  misc_feature (255)..(258): n equals a,t,g, or c
ggttaagtcagtggtctctgtctcatgtttttgttttgtttctttacagcattcaaggacagggaaacttacgagagtcttattataattattattatttacaaaatgaccctaataggtctgtttagtaacagtgaaattttttcttactccatttccatacactttctgtaaatatgtataacatgataatgatgcctggtgtattgaaatcctcaataaatactgccaagtgtgaaaaaaaaaaanaaaaannnn

SEQ ID NO: 2087 - DNA, 600 bp, Homo sapiens
  misc_feature (10)..(10): n equals a,t,g, or c
  misc_feature (29)..(29): n equals a,t,g, or c
  misc_feature (63)..(63): n equals a,t,g, or c
  misc_feature (95)..(95): n equals a,t,g, or c
  misc_feature (111)..(111): n equals a,t,g, or c
  misc_feature (118)..(118): n equals a,t,g, or c
  misc_feature (136)..(136): n equals a,t,g, or c
  misc_feature (221)..(221): n equals a,t,g, or c
  misc_feature (292)..(292): n equals a,t,g, or c
  misc_feature (317)..(317): n equals a,t,g, or c
  misc_feature (332)..(334): n equals a,t,g, or c
  misc_feature (339)..(339): n equals a,t,g, or c
  misc_feature (342)..(342): n equals a,t,g, or c
  misc_feature (361)..(361): n equals a,t,g, or c
  misc_feature (378)..(378): n equals a,t,g, or c
  misc_feature (460)..(460): n equals a,t,g, or c
  misc_feature (472)..(472): n equals a,t,g, or c
  misc_feature (478)..(478): n equals a,t,g, or c
  misc_feature (493)..(493): n equals a,t,g, or c
  misc_feature (495)..(495): n equals a,t,g, or c
  misc_feature (526)..(526): n equals a,t,g, or c
  misc_feature (542)..(542): n equals a,t,g, or c
  misc_feature (549)..(549): n equals a,t,g, or c
  misc_feature (561)..(561): n equals a,t,g, or c
  misc_feature (592)..(592): n equals a,t,g, or c
gctgacatgnttcttctggatgacaactntgcctcaattgtgactggagtagaggaaggtcgnctgatctttgataacttgaagaaatccattgnttataccttaaccagnaacattnccgagatcaccccgttcntgatatttattattgcaaacattccactaccactggggactgtcaccatcctctgaattgacttgggcactgacatggttcctgncatctccctggcttatgagcaggctgagagtgacatcatgaagagacagcccagaaatcccaaaacagacnaacttgtgaatgagcgggtgatcancatgggctaagggcnnnatggnaangatccaggccctgggaggnttctttacttactttgngattctggctgagaacgggttcctccaattcacctgttgggccttcgagtggactgggatgaccgctggatcaacgatgtgnaagacagctacnggcagnagtggactatgacanangaaaatcgggagttaactgcacacaggcttnttcgcaagattggggnggtgaangggccgattggnattgtagaacaggaggaattggcttcaagangggatgaa

SEQ ID NO: 2088 - DNA, 747 bp, Homo sapiens
  misc_feature (7)..(7): n equals a,t,g, or c
  misc_feature (12)..(12): n equals a,t,g, or c
  misc_feature (459)..(459): n equals a,t,g, or c
  misc_feature (566)..(566): n equals a,t,g, or c
  misc_feature (620)..(620): n equals a,t,g, or c
  misc_feature (624)..(624): n equals a,t,g, or c
  misc_feature (659)..(659): n equals a,t,g, or c
  misc_feature (677)..(677): n equals a,t,g, or c
  misc_feature (689)..(689): n equals a,t,g, or c
  misc_feature (721)..(721): n equals a,t,g, or c
  misc_feature (730)..(730): n equals a,t,g, or c
gggaganccctntagatcacagcccctcaccatggactggacctggagcatccttttcttggtggcagcagcaacaggtgcccactcccaggttcaactggtgcagtctggagctgaggtgaagaagcctggggcctcagtgaaggtctcctgcaaggcttccggctacagttttgtcaactatggtatcagctgggtgcgacaggcccctggacaagggcttgagtggatgggatggatcagcactgtaggtgacacaaactttgcacagaggctccagggcagagtcaccatgaccagagacgcatccacgagcacagcctatatggagctgaggagcctgagatctgacgacacggccgtatattattgtgcgagatacgattactatggttcggggaccgattcgggatttgactactggggccagggggccctggtcaccgtctcctcagcctncaccaagggcccatcggtcttccccctggcgccctgcttcaggagcaccttcgagagcacagcggccctgggctgcctggcaaaggactactttcccgaacccggtnacggtgtccgtggaactcaagcgctttgaccagcggcgtgcacacctttccggnttgncctacaagtccttaaggaactctaattccctttangaagcgtgggtgaaccgngaaccttccagnaaactttcgggacccagaacctaacaccttgnaacggtaanattcaccaaggccccag

SEQ ID NO: 2089 - DNA, 734 bp, Homo sapiens
  misc_feature (487)..(487): n equals a,t,g, or c
  misc_feature (523)..(523): n equals a,t,g, or c
  misc_feature (562)..(562): n equals a,t,g, or c
  misc_feature (571)..(571): n equals a,t,g, or c
  misc_feature (582)..(582): n equals a,t,g, or c
  misc_feature (616)..(616): n equals a,t,g, or c
  misc_feature (645)..(645): n equals a,t,g, or c
  misc_feature (650)..(650): n equals a,t,g, or c
  misc_feature (683)..(683): n equals a,t,g, or c
  misc_feature (688)..(688): n equals a,t,g, or c
  misc_feature (729)..(729): n equals a,t,g, or c
ggttttcctgcgtcaggagccgcagggccgtaggcagccatggcgcccagccggaatggcatggtcttgaagccccacttccacaaggactggcagcggcgcgtggccacgtggttcaaccagccggcccgtaagatccgcagacgtaaggcccggcaagccaaggcgcgccgcatcgccccgcgccccgcgtcgggtcccatccggcccatcgtgcgctgccccacggttcggaccacacgaaggtgcgcgccggccgcggcttcagcctggaggagctcagggtggccggcattcacaagaaggtggcccggaccatcggcatttctgtggatccgaggaggcggaacaagtccacggagtccctgcaggccaacgtgcagcggctgaaggagtaccgctccaaactcatcctcttccccaggaagccctcggcccccaagaagggagacagttctgctgaagaactgaaactggcacccagctnaccggaccggtcatgcccgtccggaacgtctattanaaggagaaagctcgagtcatcactgaggaagagaagaanttcaaaagnctttgcttagnctccgtattggcccgtgcccaacggcccgggttnttttgggaatacggggcaaaaaaagaagncccangggaaagcccgcaaaaaacaaggaatggtttgnaaaanggaaaaaaaatttaaagggcccctttccttggggggaaccnttggg

SEQ ID NO: 2090 - DNA, 768 bp, Homo sapiens
  misc_feature (13)..(13): n equals a,t,g, or c
  misc_feature (468)..(468): n equals a,t,g, or c
  misc_feature (472)..(472): n equals a,t,g, or c
  misc_feature (475)..(476): n equals a,t,g, or c
  misc_feature (478)..(480): n equals a,t,g, or c
  misc_feature (488)..(488): n equals a,t,g, or c
  misc_feature (490)..(490): n equals a,t,g, or c
  misc_feature (492)..(492): n equals a,t,g, or c
  misc_feature (495)..(496): n equals a,t,g, or c
  misc_feature (499)..(499): n equals a,t,g, or c
  misc_feature (505)..(506): n equals a,t,g, or c
  misc_feature (540)..(540): n equals a,t,g, or c
  misc_feature (556)..(556): n equals a,t,g, or c
  misc_feature (559)..(559): n equals a,t,g, or c
  misc_feature (564)..(565): n equals a,t,g, or c
  misc_feature (598)..(598): n equals a,t,g, or c
  misc_feature (655)..(655): n equals a,t,g, or c
  misc_feature (665)..(666): n equals a,t,g, or c
  misc_feature (693)..(693): n equals a,t,g, or c
  misc_feature (713)..(713): n equals a,t,g, or c
  misc_feature (737)..(737): n equals a,t,g, or c
  misc_feature (755)..(756): n equals a,t,g, or c
gcgccaacatggnccgcgttcgcaccaaaaccgtgaagaaggcggcccgggtcatcatagaaaagtactacacgcgcctgggcaacgacttccacacgaacaagcgcgtgtgcgaggagatcgccattatccccagcaaaaagctccgcaacaagatagcaggttatgtcacgcatctgatgaagcgaattcagagaggcccagtaagaggtatctccatcaagctgcaggaggaggagagagaaaggagagacaattatgttcctgaggtctcagccttggatcaggagattattgaagtagatcctgacactaaggaaatgctgaagcttttggacttcggcagtctgtccaaccttcaggtcactcagcctacagttgggatgaatttcaaaacgcctcggggacctgtttgaattttttctgtagtgctgtattattttcaataaatctgggacaacagcagancaanaannannncctcggangncncannaancactannggggcggccgctctagaggatccaagcttacgtncgcgtgcatgcgacgnccntagcnnttctatagggcacctaaattcaatttcactggncggcgttttacaacgtcggggactggggaaaaccctgggcgttccccaacttaatcngccttggaannaacatcccccttttcgcaggtgggggnattagcgaaaaaggccccgnccgattcggcctttccaacagttnggccaccctggaatgggnnaaaggggaccgc

SEQ ID NO: 2091 - DNA, 804 bp, Homo sapiens
  misc_feature (6)..(6): n equals a,t,g, or c
  misc_feature (12)..(14): n equals a,t,g, or c
  misc_feature (21)..(21): n equals a,t,g, or c
  misc_feature (674)..(674): n equals a,t,g, or c
  misc_feature (688)..(688): n equals a,t,g, or c
  misc_feature (707)..(707): n equals a,t,g, or c
  misc_feature (742)..(742): n equals a,t,g, or c
  misc_feature (745)..(745): n equals a,t,g, or c
  misc_feature (791)..(791): n equals a,t,g, or c
gcggtnaacgcnnngcaggtnccggtccggaattcccgggtcgacccacgcgtccgctctggtgcctacggggacatcgtgatgacccagtctccagactccctggctgtgtctctgggcgagagggccaccatcaactgcaaatccagccagagtgttttgtacagcttcgacaataagaactacttagcttggtaccagcagaaaccaggacaccctcctaagctgctcatttactgggcgtctacccgggaatccggggtccctgaccgatacggtggcagcgggtctgggacggatttcactctcaccatcagcagcctgcaggctgaagatgtggcggtttattactgtcagcaatattataatactcctcggacgttcggccaagggaccaaggtggaaatcaaacgaactgtggctgcaccatctgtcttcatcttcccgccatctgatgagcagttgaaatctggaactgcctctgttgtgtgcctgctgaataacttctatcccagagaggccaaagtacagtggaaggtggataacgccctccaatcgggtaactcccaggagagtgtcacagagcaggacagcaaggacaggacctacagcctcagcaagcaccctgacgcttagcaaaagcagactacgagaaacacaaagtctacgcctgngaagcacccatcanggcctgaacttcgcccggnacaaaagaagctttaacagggggaaaagtggttanaanggggaaaagtggccccccaaacttgggttccttcaaatttttaagnccttggaaccccc

SEQ ID NO: 2092 - DNA, 644 bp, Homo sapiens
  misc_feature (353)..(353): n equals a,t,g, or c
  misc_feature (360)..(360): n equals a,t,g, or c
  misc_feature (462)..(462): n equals a,t,g, or c
  misc_feature (474)..(474): n equals a,t,g, or c
  misc_feature (518)..(518): n equals a,t,g, or c
  misc_feature (534)..(534): n equals a,t,g, or c
  misc_feature (544)..(544): n equals a,t,g, or c
  misc_feature (563)..(563): n equals a,t,g, or c
  misc_feature (566)..(566): n equals a,t,g, or c
  misc_feature (582)..(582): n equals a,t,g, or c
  misc_feature (598)..(598): n equals a,t,g, or c
  misc_feature (614)..(614): n equals a,t,g, or c
gcttagccttcatgagtgtccccaccatggcctggatgatgcttctcctcggactccttgcttatggatcaggagtgcattctcagactgtggtgacccaggagccatcgttctcagtgtccccaggagggacagtcacactcacttgtggcttgacctctggctcagtctctactacttactaccccagctggtaccagcagaccccaggccaggctccacgcacgctcatctacagcacaaacagtcgcccttctggggtccctgatcgcttctctggctccatccttgggaacaaagctgccctcaccatcacgggggcccaggcagatgatgaatctgattattactgngtgctgnatatgggtagtggcatttgggtggtcggcggaaggacccaacttgaccggcctaagtcaagcccaaggttgccccttcggcaattctgttcccgccttcctntgaggaagcttnaagccaacaagggccacactggggggggctcaaaaggggacttntacccgggaagcccgngacaagtggncctggaaaggcaagatagnaanccccgtcaagggcggnagtggaagaccaccanacccttcaaacaaagnaaccaacaaggaccccggccaggaacttat

SEQ ID NO: 2093 - DNA, 679 bp, Homo sapiens
  misc_feature (17)..(17): n equals a,t,g, or c
  misc_feature (53)..(53): n equals a,t,g, or c
  misc_feature (390)..(390): n equals a,t,g, or c
  misc_feature (404)..(404): n equals a,t,g, or c
  misc_feature (409)..(409): n equals a,t,g, or c
  misc_feature (457)..(457): n equals a,t,g, or c
  misc_feature (478)..(478): n equals a,t,g, or c
  misc_feature (483)..(483): n equals a,t,g, or c
  misc_feature (501)..(501): n equals a,t,g, or c
  misc_feature (515)..(515): n equals a,t,g, or c
  misc_feature (546)..(546): n equals a,t,g, or c
  misc_feature (564)..(564): n equals a,t,g, or c
  misc_feature (595)..(595): n equals a,t,g, or c
  misc_feature (599)..(599): n equals a,t,g, or c
  misc_feature (640)..(640): n equals a,t,g, or c
  misc_feature (644)..(644): n equals a,t,g, or c
  misc_feature (660)..(660): n equals a,t,g, or c
gcggacgcgtgggccancactgggattccgaggtgtttccattcggtgatcangcactgaacacagaggactcaccatggagttttggctgagctgggttttccttgttgctatttcaaaaggtgtccagtgtgaggtgcagctggtggagactggaggaggcttgatccagcctggggggtccctgagactctcctgtgcagcctctgggttcaccgtcagtagcaactacatgagctgggtccgccaggctccagggaaggggctggagtgggtctcagttatttatagcggtggtagcacatactacgcagactccgtgaagggccgattcaccatctccagagacaattccaagaacacgctgtatcttcaaatgaacaggctganaccgaggacacggncgggnattactgggccaagactaatactatgatataaggaatggctactgggncaaggaaccctggtcaccgtntcctnagctcaccaaggcccatngtcttccccttggnaccctctccaagagcacctttggggcacaanggcccttggcttgctggncaaggactactttcccgaaccggtaacggtntcgngggaacttaaggcgcccttgaccaaggggcgtggcacaacntttnccggttggcctacagnccttaaggactttaattcc

SEQ ID NO: 2094 - DNA, 634 bp, Homo sapiens
  misc_feature (1)..(1): n equals a,t,g, or c
  misc_feature (3)..(3): n equals a,t,g, or c
  misc_feature (12)..(12): n equals a,t,g, or c
  misc_feature (36)..(36): n equals a,t,g, or c
  misc_feature (76)..(76): n equals a,t,g, or c
  misc_feature (132)..(132): n equals a,t,g, or c
  misc_feature (147)..(147): n equals a,t,g, or c
  misc_feature (195)..(195): n equals a,t,g, or c
  misc_feature (203)..(203): n equals a,t,g, or c
  misc_feature (209)..(209): n equals a,t,g, or c
  misc_feature (212)..(212): n equals a,t,g, or c
  misc_feature (214)..(214): n equals a,t,g, or c
  misc_feature (238)..(238): n equals a,t,g, or c
  misc_feature (262)..(262): n equals a,t,g, or c
  misc_feature (284)..(284): n equals a,t,g, or c
  misc_feature (291)..(291): n equals a,t,g, or c
  misc_feature (299)..(300): n equals a,t,g, or c
  misc_feature (304)..(304): n equals a,t,g, or c
  misc_feature (316)..(316): n equals a,t,g, or c
  misc_feature (328)..(328): n equals a,t,g, or c
  misc_feature (362)..(363): n equals a,t,g, or c
  misc_feature (365)..(365): n equals a,t,g, or c
  misc_feature (367)..(367): n equals a,t,g, or c
  misc_feature (379)..(379): n equals a,t,g, or c
  misc_feature (381)..(381): n equals a,t,g, or c
  misc_feature (388)..(388): n equals a,t,g, or c
  misc_feature (410)..(410): n equals a,t,g, or c
  misc_feature (416)..(417): n equals a,t,g, or c
  misc_feature (421)..(421): n equals a,t,g, or c
  misc_feature (427)..(427): n equals a,t,g, or c
  misc_feature (442)..(442): n equals a,t,g, or c
  misc_feature (455)..(455): n equals a,t,g, or c
  misc_feature (478)..(478): n equals a,t,g, or c
  misc_feature (529)..(529): n equals a,t,g, or c
  misc_feature (568)..(568): n equals a,t,g, or c
  misc_feature (579)..(579): n equals a,t,g, or c
  misc_feature (610)..(610): n equals a,t,g, or c
  misc_feature (614)..(614): n equals a,t,g, or c
  misc_feature (633)..(633): n equals a,t,g, or c
nanaaataaaanaattcccggttcgacccacgcgtncgctggcttcaacttggggaacacggccaccctgaccatnagcagagcccaagccggggatgaggctgactattattgtcaggtgtgggacagcanccctgcatcctgggngttcggcggagggaccaagctgaccgtcctaggtcagcccaaggctgncccctcgntcactntgntnccgccctcctctgaggagcttcangccaacaagggcacactggtgtgnctgataagtgacttctacccgnaagccgngacagtgnnctgnaaggcagatagnaaccccagccanggcggaagtggagaccaccacaccctccaagcanngnancaacaagtacgngntcagcangtacctgagcctgacgcctgancagtgnnagtnccacanaagctacagctgccnggtcacgcatgangggagcaccgcggagaagacagnggcccctacagaatgatcataggttgtcaaccctcaccccccaccacgggnaagactaggagctgcaggatcccagggggagggggtctntcctccacccnaaggcatcaagccctttctcccttgcactcnatanacccctcaataaatattcng

SEQ ID NO: 2095 - DNA, 443 bp, Homo sapiens
  misc_feature (299)..(299): n equals a,t,g, or c
  misc_feature (359)..(359): n equals a,t,g, or c
  misc_feature (408)..(408): n equals a,t,g, or c
  misc_feature (410)..(410): n equals a,t,g, or c
  misc_feature (415)..(415): n equals a,t,g, or c
  misc_feature (421)..(421): n equals a,t,g, or c
ggttttgttaaacctgataagttttgtactagtaaaattctagaattctaagcatagatttaaacattgctgaaaaatgagtttgtgtgttttatgccttccaggggacagttaagtgggcagtatttatttaatatacctgcttcagccccatttgaattgtaagcactctgaaagcatgtctcatagtcgtctgtatccctggtgtctcccacagtgccctgcttacctgcaggcctttttgtattttctgtccaagtaccctaatagggtggtgcagaatggatgtacagatctgnggatgacctcagcagcttaatccaaggcacccctcgggaagcctgaaatgtctttgaagncttatgtattatcctaaaatccattgacattttatattctaccctacanantaagnatgcgntactatttttctttccaaattg

SEQ ID NO: 2096 - DNA, 488 bp, Homo sapiens
  misc_feature (453)..(453): n equals a,t,g, or c
  misc_feature (471)..(471): n equals a,t,g, or c
  misc_feature (473)..(488): n equals a,t,g, or c
gatttttttggaaacctctgcgccatgagagccaaggtgagcggttcctggtagtaagcttgggaggtaggagttggcgagtagtagcgaggagacgaagtggaggaagaagcgaatgcgcaggctgaagcgcaaaagaagaaagatgaggcagaggtccaagtaaaccgctagcttgttgcaccgtggaggccacaggagcagaaacatggaatgccagacgctggggatgctggtacaagttgtgggactgcatgctactgtctagagcttgtctcaatggatctagaacttcatcgccctctgatcgccgatcacctctgagacccaccttgctcataaacaaaatgcccatgttggtcctctgccctggacctgtgacattctggactatttctgtgtttatttgtggccgagtgtaacaaccatataataaatcacctcttccgctgntttagctgaagaattaanannnnnnnnnnnnnnnn

SEQ ID NO: 2097 - DNA, 304 bp, Homo sapiens
  misc_feature (10)..(10): n equals a,t,g, or c
  misc_feature (15)..(15): n equals a,t,g, or c
  misc_feature (20)..(20): n equals a,t,g, or c
  misc_feature (23)..(23): n equals a,t,g, or c
  misc_feature (41)..(41): n equals a,t,g, or c
gggggggaangggantgganaanctccttctagggttaagntgccacgcctgcaggtaccggtccggaattcccgggtcgacccacgcgtccggtttttctctcccacactataattttactaaaatgttacattgttccagagttaatcaggatactctgtgaaattaaaccttaattgtgatttggctacttccatcttagagaaaattaaaagagaaatattagaaaatgataatttcaggctggatgcagtggctcatgcctataatcccaacacttcgtgatgacaaggcgggaagatt

SEQ ID NO: 2098 - DNA, 793 bp, Homo sapiens
  misc_feature (514)..(514): n equals a,t,g, or c
  misc_feature (552)..(552): n equals a,t,g, or c
  misc_feature (561)..(561): n equals a,t,g, or c
  misc_feature (645)..(645): n equals a,t,g, or c
  misc_feature (659)..(659): n equals a,t,g, or c
  misc_feature (680)..(680): n equals a,t,g, or c
  misc_feature (691)..(691): n equals a,t,g, or c
  misc_feature (711)..(711): n equals a,t,g, or c
  misc_feature (714)..(714): n equals a,t,g, or c
  misc_feature (732)..(732): n equals a,t,g, or c
  misc_feature (750)..(750): n equals a,t,g, or c
  misc_feature (789)..(789): n equals a,t,g, or c
gcccagccccagaattcccaggagtttccattcggtgatcagcactgaacacagaggactcaccatggagtttgggctgagctgggttttccttgttgctattataaaaggtgtccagtgtcaggtgcagctggtggagtctgggggaggtttggtcaagcctggagggtccctgagactctcctgtgcagcctctggattcaccttcagtgacttctacatgtcttggatccgccaagttccagggaagggactggagtggatttcatatattagtcctagtgccacaaacattttctacacagactctgtgcaggaccgattcaccatctccagggacaatgccaagaattcactgtatctgcaaatgaacagcctgagggtcgaggacacggccgtctatttctgtgcgagagaattgtttgatggttttgatctgtggggccaggggacaatggtctccgtctcttcagcttcaccaagggcccatcggtcttcccctggcacccttctncaagagcacctctgggggcacaagcggccctggcttgnctggtcaangactactttcccgaaccggtgacggtgtcgtggaactcaagcgcccttgaccaagcggcggggcacaacctttcccgggttggncctacaggtccttnaaggacttttaacttcccttnaacaaacggtngggtggaacccgggggcccnttncaaacaagcttttggggnaaccccccaggacccttnaaattttttgggaaaacggggggaaatttccccaaaggncccc

SEQ ID NO: 2099 - DNA, 792 bp, Homo sapiens
  misc_feature (488)..(488): n equals a,t,g, or c
  misc_feature (603)..(603): n equals a,t,g, or c
  misc_feature (635)..(635): n equals a,t,g, or c
  misc_feature (645)..(645): n equals a,t,g, or c
  misc_feature (676)..(676): n equals a,t,g, or c
  misc_feature (688)..(688): n equals a,t,g, or c
  misc_feature (706)..(706): n equals a,t,g, or c
  misc_feature (746)..(746): n equals a,t,g, or c
  misc_feature (772)..(772): n equals a,t,g, or c
  misc_feature (774)..(774): n equals a,t,g, or c
  misc_feature (787)..(787): n equals a,t,g, or c
gggggcagcaagatggtgttgcagacccaggtcttcatttctctgttgctctggatctctggtgcctacggggacatcgtgatgacccagtctccagactccctggctatgtctttgggcgagagggccaccatcaactgcaagtccagccagagtgttttatacagctccaacaataagaattacttagcttggtaccagcaaaaaccaggacagcctcctaagctgctcatttactgggcatctacccgggattccggggtccctgaccgattcagtggcagcgggtctgggacagatttcactctcaccatcagcagcctgcaggctgaagatgtggcagtttattactgtcagcaatattataatactcctcagacttttggccaggggaccaagctggagatcaaacgaactgtggctgcaccatctgtcttcatcttcccgccatctgatgagcagttgaaatctggaactgcctctggtgngtgcctgctgaataacttctatcccagagaggccaaagtacagtggaaggtggataacgcccttcaatcgggtaacttccaggagaagtgtacagagcaggacagcaaggacagnacctacaggcttaagcagcaccctgacgcttnagcaaagcangactacgaggaaaccccaaggctacgcctgngaaagcacccantaagggcctggagcttgnccgtacaaaagagctttaaccagggggaaaagggtttaangggaaaagggccccacctggttcctnanttccaggccgganccctt

SEQ ID NO: 2100 - DNA, 429 bp, Homo sapiens
  misc_feature (1)..(1): n equals a,t,g, or c
  misc_feature (6)..(6): n equals a,t,g, or c
  misc_feature (13)..(13): n equals a,t,g, or c
  misc_feature (24)..(24): n equals a,t,g, or c
  misc_feature (27)..(27): n equals a,t,g, or c
  misc_feature (159)..(159): n equals a,t,g, or c
  misc_feature (198)..(198): n equals a,t,g, or c
  misc_feature (205)..(205): n equals a,t,g, or c
  misc_feature (226)..(226): n equals a,t,g, or c
  misc_feature (231)..(231): n equals a,t,g, or c
  misc_feature (236)..(236): n equals a,t,g, or c
  misc_feature (238)..(238): n equals a,t,g, or c
  misc_feature (260)..(260): n equals a,t,g, or c
  misc_feature (272)..(272): n equals a,t,g, or c
  misc_feature (284)..(284): n equals a,t,g, or c
  misc_feature (289)..(289): n equals a,t,g, or c
  misc_feature (300)..(300): n equals a,t,g, or c
  misc_feature (307)..(307): n equals a,t,g, or c
  misc_feature (326)..(326): n equals a,t,g, or c
  misc_feature (339)..(339): n equals a,t,g, or c
  misc_feature (349)..(349): n equals a,t,g, or c
  misc_feature (368)..(368): n equals a,t,g, or c
  misc_feature (378)..(378): n equals a,t,g, or c
  misc_feature (415)..(415): n equals a,t,g, or c
nctggncccaccntctgtggggtntgnggggccattgggcttgttacgccccctggagggtgcctgccgtgtggcgccctctggtgggagctggtggttttcacacgtgagagcctgggtgagacctggtttctttctttcagacccagacagtgattnacacagtgcaaagcgcccctgtacagatgttctctactnccgcatnccacctatgatgtacccgcangccgnctatncnatgcctttcatcaccaccattntgggagggctgnacccatccaagngcatnctactgtaagncactggnctgcccagtgcccagaggnaagccaagggctncagtgacctntgggaagagagagcccttnaaggtcagtncagcatttccctgcttaggaaggctactgatgatggngaggaaatgggact

SEQ ID NO: 2101 - DNA, 781 bp, Homo sapiens
  misc_feature (2)..(2): n equals a,t,g, or c
  misc_feature (13)..(13): n equals a,t,g, or c
  misc_feature (21)..(21): n equals a,t,g, or c
  misc_feature (31)..(31): n equals a,t,g, or c
  misc_feature (45)..(45): n equals a,t,g, or c
  misc_feature (659)..(659): n equals a,t,g, or c
  misc_feature (661)..(661): n equals a,t,g, or c
  misc_feature (680)..(680): n equals a,t,g, or c
  misc_feature (713)..(713): n equals a,t,g, or c
  misc_feature (725)..(725): n equals a,t,g, or c
  misc_feature (739)..(739): n equals a,t,g, or c
  misc_feature (780)..(781): n equals a,t,g, or c
gnagaacgggcgngaaccccnctagggaatnctggtacgcctgcnggtaccggtccggaattcccgggtcgacccacgcgtccgaaaattttggcatatggcattttctaacttaggaagccacaatgttcttggcccatcatgacattgggtagcattaactgtaagttttgtgcttccaaatcactttttggtttttaagaatttcttgatactcttatagcctgccttcaattttgatcctttattctttctatttgtcaggtgcacaagattaccttcctgttttagccttctgtcttgtcaccaaccattcttacttggtggccatgtacttggaaaaaggccgcatgatctttctggctccactcagtgtctaaggcaccctgcttcctttgcttgcatcccacagactatttccctcatcctatttactgcagcaaatctctccttagttgatgagactgtgtttatctccctttaaaaccctacctatcctgaatggtctgtcattgtctgcctttaaaatccttcctctttcttcctcctctattctctaaataatgatggggctaagttatacccaaagctcactttacaaaatatttcctcagtactttgcagaaaacaccaaacaaaaatgccattttaaaaaaggngnattttttcttttagaatgnaagcttctcaagagcagggacaatggtttctgnatggtctattgngcctaggacactgnaaatgctcaataaatattgatgatgggaggcaaaaaaaaann

SEQ ID NO: 2102 - DNA, 640 bp, Homo sapiens
  misc_feature (1)..(1): n equals a,t,g, or c
  misc_feature (3)..(4): n equals a,t,g, or c
  misc_feature (18)..(18): n equals a,t,g, or c
  misc_feature (87)..(87): n equals a,t,g, or c
  misc_feature (332)..(332): n equals a,t,g, or c
  misc_feature (400)..(400): n equals a,t,g, or c
  misc_feature (534)..(534): n equals a,t,g, or c
  misc_feature (557)..(557): n equals a,t,g, or c
  misc_feature (608)..(608): n equals a,t,g, or c
  misc_feature (612)..(612): n equals a,t,g, or c
  misc_feature (631)..(631): n equals a,t,g, or c
  misc_feature (633)..(633): n equals a,t,g, or c
nanncctacggaaaggcnctgctggtacgtttgcaggaaccgccccggaattcccgggtcgacccacgcgtccgccaccatgccgtnctacaccgtggtctatttcccagttcgaggccgctgcgcggccctgcgcatgctgctggcagatcagggccagagctggaaggaggaggtggtgaccgtggagacgtggcaggagggctcactcaaagcctcctgcctatacgggcagctccccaagttccaggacggagacctcaccctgtaccagtccaataccatcctgcgtcacctgggccgcacccttgggctctatgggaaggaccagnaggaggcagccctggtggacatggtgaatgacggcgtggaggacctccgctgcaaatacatctccctnatctacaccaactatgaggcgggcaaggatgactatgtgaaggcactgcccgggcaactgaagccttttgagaccctgctgtcccagaaccagggaggcaagaccttcattgtgggagaccagatctccttcgntgactacaacctgctggacttgntgctgatccatgaggtcctagcccctggctgcctggatgcgttccccctgntctnagcatatgtggggcgcctnantgcccgg

SEQ ID NO: 2103 - DNA, 704 bp, Homo sapiens
  misc_feature (9)..(10): n equals a,t,g, or c
  misc_feature (15)..(15): n equals a,t,g, or c
  misc_feature (21)..(21): n equals a,t,g, or c
  misc_feature (25)..(25): n equals a,t,g, or c
  misc_feature (353)..(353): n equals a,t,g, or c
  misc_feature (383)..(383): n equals a,t,g, or c
  misc_feature (434)..(434): n equals a,t,g, or c
  misc_feature (483)..(483): n equals a,t,g, or c
  misc_feature (511)..(511): n equals a,t,g, or c
  misc_feature (555)..(555): n equals a,t,g, or c
  misc_feature (640)..(640): n equals a,t,g, or c
  misc_feature (645)..(645): n equals a,t,g, or c
  misc_feature (651)..(651): n equals a,t,g, or c
  misc_feature (675)..(675): n equals a,t,g, or c
  misc_feature (691)..(691): n equals a,t,g, or c
agcgcagcnnctctnctcttnaggntacagggttgtcacctgctgagtcctcaggttgtttggcctctctggtccatcttgggcattaggttctccagcagagctctggccagctgcctcttctttaactgggaacacaggctctcacaagatcagaacccccactcacccccaagatcttatctagcaagcctgtagtattcagtttctgttgtaggaagagagcgaggcatccctgaattccacgcatctgctggaaacgagccgtgtcagatcgcacatccctgcgcccccatgcccccatgcccctctgagtcacacaggacagaggaggcagagcttctgcccactgntatcttcactttctttgtccagtcttttgnttttaataagcagtgaccctccctactcttctttttaatgatttttgtagntgatttgtctgaactgtggctactgggcattccttgaataatcacttgnaaaaattgcaagtgcttgaagctggttnctttactcacattgaagggattcgtggttttttggagtcttggntgggacttcaagagcagagtgaggaaagacccccaagcataagactcgggtactgggatgatggcttggagtccaagtttaagantctgnttttanggggtcccttggataacaaggganttaacaatatacattncttataaattaaa

SEQ ID NO: 2104 - DNA, 821 bp, Homo sapiens
  misc_feature (24)..(24): n equals a,t,g, or c
  misc_feature (30)..(30): n equals a,t,g, or c
  misc_feature (49)..(49): n equals a,t,g, or c
  misc_feature (51)..(51): n equals a,t,g, or c
  misc_feature (56)..(56): n equals a,t,g, or c
  misc_feature (116)..(117): n equals a,t,g, or c
  misc_feature (119)..(119): n equals a,t,g, or c
  misc_feature (487)..(487): n equals a,t,g, or c
  misc_feature (645)..(645): n equals a,t,g, or c
  misc_feature (656)..(656): n equals a,t,g, or c
  misc_feature (725)..(725): n equals a,t,g, or c
  misc_feature (733)..(733): n equals a,t,g, or c
  misc_feature (768)..(768): n equals a,t,g, or c
  misc_feature (806)..(806): n equals a,t,g, or c
ttgatcgacggggggggggataangggcgngaaacccttcctataggtnangctgntacgcctgcaggtaccggtccggaattcccgggtcgacccacgcgtccgggcggagctgnngngcatgcaggatgtggtggaggacttcaagaataagtacgaagatgaaattaaccgccgcacagctgctgagaatgagtttgtggtgctgaagaaggatgtggatgctgcctacatgagcaaggtggagctggaggccaaggtggatgccctgaatgatgagatcaacttcctcaggaccctcaatgagacggagttgacagagctgcagtcccagatctccgacacatctgtggtgctgtccatggacaacagtcgctccctggacctggacggcatcatcgctgaggtcaaggcacagtatgaggagatggccaaatgcagccgggctgaggctgaagcctggtaccagaccaagtttgagaccctncaggcccaggctgggaagcatggggacgacctccggaatacccggaatgagatttcagagatgaaccgggccatccagaggctgcaggctgagatcgacaacatcaagaaccagcgtgccaagttggaggccgcattgccgaggctgaagagcgtggngagctgcgctnaaggatgctcgtgccaaagcaggaagagctggaaagcccgccttcaacggcccaaagcaggatattggnacgggaanttgcgtgagtaccaaggaacttaatgaagccgtgnaacttggcccttggacaatcgaggatcggcaacctaancggaaagcttgcttg

SEQ ID NO: 2105 - DNA, 780 bp, Homo sapiens
  misc_feature (12)..(12): n equals a,t,g, or c
  misc_feature (76)..(76): n equals a,t,g, or c
  misc_feature (259)..(259): n equals a,t,g, or c
  misc_feature (281)..(281): n equals a,t,g, or c
  misc_feature (362)..(362): n equals a,t,g, or c
  misc_feature (514)..(514): n equals a,t,g, or c
  misc_feature (699)..(699): n equals a,t,g, or c
  misc_feature (738)..(738): n equals a,t,g, or c
  misc_feature (746)..(746): n equals a,t,g, or c
  misc_feature (750)..(751): n equals a,t,g, or c
  misc_feature (770)..(771): n equals a,t,g, or c
  misc_feature (780)..(780): n equals a,t,g, or c
gaaagggcttanaggataaggaggccattcaggcctattctgaatccctgatgacatcagctcccaagggctctgngctgcaggaagcaaaactgtagggtcctgaggacaccgtgagccagccaggcctggccgctgggcctgaccggccccccagcccctacaccccgcttctcccggactctcccagcggacagccccccagccccacagcctgagcctcccagctgccatgtgcctgttgcacacctgcacacangccctggcacacatacacacangcgtgcaggcttgtgcagacactcagggatggagctgctgctgaagggacttgtagggagaggctcgacaacaagcactgntctggaaccttctctccacgtggcccacaggcctgaccacaggggctgtgggtcctgcgtccccttcctcgggtgagcctggcctgtcccgttcagccgttgggcccaggcttcctcccctccaaggtgaaacactgcagtcccggtgtggnggctccccatgcaggacgggccaggctgggagtgccgccttctggccaaaatcagtggggactcaatgcccaggccctggccacgagctttggccttgggctacctgccaggccaggcaaaagcgcctttacacaggccttgggaaaacaatggagttgagcacaagaagccctgtgcaagcttncccgaggggcttccggccaacccgggccggacttttgancccccccnaagnntttacaggcacttggcaanngggttggcn

SEQ ID NO: 2106 - DNA, 563 bp, Homo sapiens
  misc_feature (8)..(8): n equals a,t,g, or c
  misc_feature (12)..(12): n equals a,t,g, or c
  misc_feature (17)..(17): n equals a,t,g, or c
  misc_feature (162)..(162): n equals a,t,g, or c
  misc_feature (231)..(231): n equals a,t,g, or c
  misc_feature (307)..(307): n equals a,t,g, or c
  misc_feature (319)..(319): n equals a,t,g, or c
  misc_feature (370)..(370): n equals a,t,g, or c
  misc_feature (396)..(396): n equals a,t,g, or c
  misc_feature (403)..(403): n equals a,t,g, or c
  misc_feature (459)..(459): n equals a,t,g, or c
  misc_feature (461)..(461): n equals a,t,g, or c
  misc_feature (465)..(465): n equals a,t,g, or c
  misc_feature (471)..(471): n equals a,t,g, or c
  misc_feature (483)..(483): n equals a,t,g, or c
  misc_feature (498)..(498): n equals a,t,g, or c
  misc_feature (563)..(563): n equals a,t,g, or c
ggacaagnttantgccntgaagtatgagcaaggcacgggctgctggcagggccccaaccgctccaccaccgtgcgcctcctgtgcggtaaagagaccatggtgaccagcaccacagagcccagtcgctgcgagtacctcatggagctgatgacgccagccgnctgcccggagccaccgcctgaagcacccaccgaagacgaccatgacgagctctagctggatgggcgcanagaacctcaagaaggcatgaagccagcccctgcagtgccgtccacccgcccctctgggcctgcctgtggctctgtngccctcctctgnggcggcaggacctttgtggggcttcgtgccctgctctggggcccaggcggngctggtccacattcccaggccccaanagccttnaaagatgggtaaaggagcttgccctccctgggccccccaccttggtgactcgcccnancacncccagncctgtccctgcnacccctcctagtggngactagtgaatgacttgacctgtgacctcaatacaataaatgtgatcccccacccaaaaaaaagn

SEQ ID NO: 2107 - DNA, 498 bp, Homo sapiens
  misc_feature (11)..(11): n equals a,t,g, or c
  misc_feature (14)..(14): n equals a,t,g, or c
  misc_feature (44)..(44): n equals a,t,g, or c
  misc_feature (48)..(48): n equals a,t,g, or c
  misc_feature (304)..(304): n equals a,t,g, or c
  misc_feature (339)..(339): n equals a,t,g, or c
  misc_feature (440)..(440): n equals a,t,g, or c
  misc_feature (447)..(447): n equals a,t,g, or c
  misc_feature (473)..(473): n equals a,t,g, or c
  misc_feature (493)..(493): n equals a,t,g, or c
  misc_feature (496)..(496): n equals a,t,g, or c
acccttacacnagnatctatgggaaaactcactcactattgggnaagntggccgcctgcaggtaccggtccggaattcccgggtcgacccacgcgttcgggacaatctccagcatggcctggtctcctctcctcctcactctcctcgctcactgcacagggtcctgggcccagtctgtgctgacgcagccgccctcagtgtctggggccccagggcagagggtcactatctcctgtactgggagcagctccaccatcggggcaggttatgatgtacactggtaccgacaacttccaggaacagnccccaaactccttatgtatgcctatgacaatcggncctcaggggtccctgaccgattctctggctccaggtctggcacctcagccttcctgggcatcggtgggctccagcctgaggatgaggctgattattactgncagtcgnatgacaacaacttgagcgggtatgtnttcggaactgggaccaaggncancg

SEQ ID NO: 2108 - DNA, 727 bp, Homo sapiens
  misc_feature (11)..(11): n equals a,t,g, or c
  misc_feature (16)..(16): n equals a,t,g, or c
  misc_feature (126)..(126): n equals a,t,g, or c
  misc_feature (146)..(146): n equals a,t,g, or c
  misc_feature (437)..(437): n equals a,t,g, or c
  misc_feature (439)..(439): n equals a,t,g, or c
  misc_feature (499)..(499): n equals a,t,g, or c
  misc_feature (677)..(677): n equals a,t,g, or c
  misc_feature (695)..(695): n equals a,t,g, or c
  misc_feature (709)..(709): n equals a,t,g, or c
  misc_feature (722)..(722): n equals a,t,g, or c
  misc_feature (726)..(726): n equals a,t,g, or c
gggcatcgttnccatnaaggccctggtggtagcatgggtgggggtggaggacatcgtccccacgaaggccctggcggtggcatcagtggtggcagtggccatcgtccccatgaaggccctggcggnggaatgggtgccggtggtgnacatcgcccccacgaaggccctggcggaagcatggttggaagtggtggacatcgtccccatgaaggccctggacacggggggccccatggccaccggcctcatgatgtccctggtcaccgaggccatgaccatcgagggccgccacctcatgagcaccgtggccatgatggtcctggccacgggggagggggccaccgagggcacgatggaggccacagccatggaggaggtgaggatgctccctgtcccccatatgccttttggttgtcccatacaagcttttggggagngnggtgaagagtcactactgttggtagctaggcagaacgtgaggtacccgtctctttgatgncctagtatgcatagcagttcctactctatgcccttccccaaatccccaagattgtctctgaaagacagttctcaggatgtcatggacaaggggtgggtgaggatggcattgccctcagctatttcctggctaactggtttgcatcggtcccacagacatgtcaaccggccttgtttgncgacatttcatgatgaanggcaactgccgctntgagaacaactgngccnt

SEQ ID NO: 2109 - DNA, 779 bp, Homo sapiens
  misc_feature (10)..(10): n equals a,t,g, or c
  misc_feature (641)..(641): n equals a,t,g, or c
  misc_feature (676)..(676): n equals a,t,g, or c
  misc_feature (721)..(721): n equals a,t,g, or c
  misc_feature (756)..(756): n equals a,t,g, or c
  misc_feature (774)..(774): n equals a,t,g, or c
gctgaaaagnttggactgccccagtgaaagcacaggaaatggacccccccacctggcccacccaaacctggacacatttaccccggaggagctgctgcagcagatgaaagagctcctgaccgagaaccaccagctgaaagaagccatgaagctaaataatcaagccatgaaagggagatttgaggagctttcggcctggacagagaaacagaaggaagaacgccagttttttgagatacagagcaaagaagcaaaagagcgtctaatggccttgagtcatgagaatgagaaattgaaggaagagcttggaaaactaaagggaaatcagaaaggtcatctgaggaccccactgatgactccaggcttcccagggccgaagcggagcaggaaaaggaccagctcaggacccaggtggtgaggctacaagcagagaaggcagacctgttgggcatcgtgtctgaactgcagctcaagctgaactccagcggctcctcagaagattcctttgttgaaattaggatggctgaaggagaagcagaagggtcagtaaaagaaatcaagcatagtcctggcccacgagaacagtctccactggcacgagcagatctgcagatggggccaagaattacttcgaacatgangaggtaactgtgagccagcttctgctgtgcctaanggaagggaatcagaaggtggagagacttgagttgcctcaggaggnccaagaaagagttcagaatttgaaaggaaaccagnaatcgtttgagaatgaanccaga

SEQ ID NO: 2110 - DNA, 680 bp, Homo sapiens
  misc_feature (527)..(527): n equals a,t,g, or c
  misc_feature (588)..(588): n equals a,t,g, or c
  misc_feature (599)..(599): n equals a,t,g, or c
  misc_feature (631)..(631): n equals a,t,g, or c
  misc_feature (661)..(661): n equals a,t,g, or c
  misc_feature (666)..(666): n equals a,t,g, or c
gcactgtggcttctggcatacctgctggctggatgggcttggactgtggtcctgaaagcagcaagaagtatgctgaggctgtcactcgggctaagcagattgtgtggaatggtcctgtgggggtatttgaatgggaagcttttgcccggggaaccaaagctctcatggatgaggtggtgaaagccacttctaggggctgcatcaccatcataggtggtggagacactgccacttgctgtgccaaatggaacacggaggataaagtcagccatgtgagcactgggggtggtgccagtttggagctcctggaaggtaaagtccttcctggggtggatgctctcagcaatatttagtactttcctgccttttagttcctgtgcacagcccctaagtcaacttagcattttctgcatctccacttggcattagctaaaaccttccatgtcaagattcaactagtggccaagagatgcagtgccaggaacccttaaacagtttgcacaagcatctcaactcatcttcactgnaccctggatttgcatacattcttcaagatccccatttggaattttttaaggggactaaaanccattgggcanttctaaaagggcataataatttaataattttnggcctggttaaaaaaaggaaagggtggaanccagngggttaagcttaaa

SEQ ID NO: 2111 - DNA, 756 bp, Homo sapiens
  misc_feature (599)..(599): n equals a,t,g, or c
  misc_feature (604)..(604): n equals a,t,g, or c
  misc_feature (611)..(611): n equals a,t,g, or c
  misc_feature (614)..(614): n equals a,t,g, or c
  misc_feature (691)..(691): n equals a,t,g, or c
  misc_feature (731)..(731): n equals a,t,g, or c
  misc_feature (745)..(745): n equals a,t,g, or c
  misc_feature (748)..(748): n equals a,t,g, or c
  misc_feature (755)..(755): n equals a,t,g, or c
gcggacgcgtgggcggacgcgtgggcggacgcgtgggttcgggccgagatgtctcgctccgtggccttagctgtgctcgcgctactctctctttctggcctggaggctatccagcgtactccaaagattcaggtttactcacgtcatccagcagagaatggaaagtcaaatttcctgaattgctatgtgtctgggtttcatccatccgacattgaagttgacttactgaagaatggagagagaattgaaaaagtggagcattcagacttgtctttcagcaaggactggtctttctatctcttgtactacactgaattcacccccactgaaaaagatgagtatgcctgccgtgtgaaccatgtgactttgtcacagcccaagatagttaagtgggatcgagacatgtaagcagcatcatggaggtttgaagatgccgcatttggattggatgaattccaaattctgcttgcttgctttttaatattgatatgcttatacacttacactttatgcacaaaatgtaggggtataataatggtaacatggacatgatcttctttataaatctaccttgaagtgctggcttcatggtttgatgnatctnaacaggntgnttcccaggtagcttctaggaggcttggcaaccttaaaggtggggaagcaaagaattctcttatccacattaacaatnttgggcagaattgaactctttaaactcttggcttcaaaanttggtaaaaaaagntanaggggcna

SEQ ID NO: 2112 - DNA, 594 bp, Homo sapiens
  misc_feature (540)..(540): n equals a,t,g, or c
  misc_feature (572)..(572): n equals a,t,g, or c
  misc_feature (578)..(579): n equals a,t,g, or c
  misc_feature (585)..(585): n equals a,t,g, or c
ggacggctgtctgctattctgcaattatttttgagactcccctccgagtggacgttgcagtgctgaaagcgcgagcgaagctgctgcagaaatacctgtgtgacgagcagaaggagctacaggcgctctacgccctccaggcccttgtagtgaccttagaacagcctcccaacctgctgcggatgttctttgacgcactgtatgacgaggacgtggtgaaggaggatgccttctacagttgggagagtagcaaggaccccgctgagcagcagggcaagggtgtggcccttaaatctgtcacagccttcttcaagtggctccgtgaagcagaggaggagtctgaccacaactgagggctggtggggccggggacctggagccccatggacacacagatggcccggctagccgcctggactgcaggggggcggcagcagcggcggtggcagtgggtgcctgtagtgtgatgtgtctgaactaataaagtggctgaagaggcaggatggcttggggctgcctgggcccccttcaggatgccgncaggtgtcctctctcccctgggcacagagatntatatnnttaagncttgaaatt

SEQ ID NO: 2113 - DNA, 781 bp, Homo sapiens
  misc_feature (594)..(594): n equals a,t,g, or c
  misc_feature (656)..(656): n equals a,t,g, or c
  misc_feature (675)..(677): n equals a,t,g, or c
  misc_feature (699)..(699): n equals a,t,g, or c
  misc_feature (708)..(710): n equals a,t,g, or c
  misc_feature (712)..(712): n equals a,t,g, or c
  misc_feature (767)..(767): n equals a,t,g, or c
  misc_feature (771)..(771): n equals a,t,g, or c
  misc_feature (780)..(780): n equals a,t,g, or c
gttgcaccacccgctttttcgagacctgtgacctggacaatgacaagtacatcgccctggatgagtgggccggctgcttcggcatcaagcagaaggatatcgacaaggatcttgtgatctaaatccactccttccacagtaccggattctctctttaaccctccccttcgtgtttcccccaatgtttaaaatgtttggatggtttgttgttctgcctggagacaaggtgctaacatagatttaagtgatacggtgctaaaaatgaaaattctaacccaagacatgacattcttagctgtaacttaactattaaggccttttccacacgcattaatagtcccatttttctcttgccatttgtagctttgcccattgtcttattggcacatgggtggacacggatctgctgggctctgccttaaacacacattgcagcttcaacttttctctttagtgttctgtttgaaactaatacttaccgagtcagactttgtgttcatttcatttcagggtcttggctgcctgtgggcttccccaggtggcctggaggtgggcaaagggaagtaacagacacacgatgttgtcaaggatggntttgggactagaggctcagtggtgggagagatccctgcagaacccacaacccagaacggggnttggctgagctggaactgnnnagaaagaatcttggggctgggntatgaaaannntngacctttttcacattaaagccccaggttcattaccattttccttccctttaaccntttnaagggcagnt

SEQ ID NO: 2114 - DNA, 821 bp, Homo sapiens
  misc_feature (32)..(32): n equals a,t,g, or c
  misc_feature (56)..(56): n equals a,t,g, or c
  misc_feature (82)..(82): n equals a,t,g, or c
  misc_feature (119)..(119): n equals a,t,g, or c
  misc_feature (172)..(172): n equals a,t,g, or c
  misc_feature (178)..(178): n equals a,t,g, or c
  misc_feature (197)..(197): n equals a,t,g, or c
  misc_feature (250)..(250): n equals a,t,g, or c
  misc_feature (472)..(472): n equals a,t,g, or c
  misc_feature (497)..(497): n equals a,t,g, or c
  misc_feature (642)..(642): n equals a,t,g, or c
  misc_feature (750)..(750): n equals a,t,g, or c
  misc_feature (758)..(758): n equals a,t,g, or c
  misc_feature (792)..(792): n equals a,t,g, or c
  misc_feature (808)..(808): n equals a,t,g, or c
  misc_feature (818)..(818): n equals a,t,g, or c
cgccccggaattcccgggtcgacccacgcgtncggggacatgaagggttcccgctnagctcctggggctcctgctgctctgnctgccaggtgccaaatgtgacatccagatgacccagnctccttccaccctgtctgcatctgtaggagacagagtcaccatcacttgccgngccagncagagtattagtagctggntggcctggtatcagcagaaaccagggaaagcccctaagctcctgatctataangcgtctagtttagaaagtggggtcccatcaaggttcagcggcagtggatctgggacagaattcactctcacaatcagcagcctgcagcctgatgattttgcaacttattactgccaacactataatagttatccgtacacttttggccagggaccaagctggagatcaaacgaactgtggctgcaccatctgcttcatcttcccgccatctgatgagcaagntgaaatctggaactgcctctgttgngtgcctgctgaataacttctatcccagagaggccaaagtacagtgtaaggtggataacgccctccaatcgggtaactcccaggagagtgtcacagagcaagacagcaaggacagcacctacagcctcagcagcaccctgacgctnagcaaagcagactacgaagaaacacaaagtctacgcctgcgaagtcacccatcaaggcctgagcttggccgtcacaaagagcttcaacaggggaaaagtgttaccacngggaaagngccccaacctgggtctcaaattcccgggctggancccccttccaattccntttggccctnttg

SEQ ID NO: 2115 - DNA, 789 bp, Homo sapiens
  misc_feature (504)..(504): n equals a,t,g, or c
  misc_feature (682)..(682): n equals a,t,g, or c
  misc_feature (690)..(690): n equals a,t,g, or c
  misc_feature (753)..(753): n equals a,t,g, or c
  misc_feature (787)..(787): n equals a,t,g, or c
gggacaagagagttgagcccaaatcttgtgacaaaactcacacatgcccaccgtgcccagcacctgaactcctggggggaccgtcagtcttcctcttccccccaaaacccaaggacaccctcatgatctcccggacccctgaggtcacatgcgtggtggtggacgtgagccacgaagaccctgaggtcaagttcaactggtacgtggacggcgtggaggtgcataatgccaagacaaagccgcgggaggagcagtacaacagcacgtaccgtgtggtcagcgtcctcaccgtcctgcaccaggactggctgaatggcaaggagtacaagtgcaaggtctccaacaaagccctcccagcccccatcgagaaaaccatctccaaagccaaagggcagccccgagaaccacaggtgtacaccctgcccccatcccgggaggagatgaccaagaaccaggtcagcctgacctgcctggtcaaaggcttctatcccagcgacatcgccntggagtgggagagcagcgggcagccggagaacaactaccagaccacgcctcccgtgctggactccgacggctccttcttcctctatagcaagctaccgtggacaagacaggtggcagcagggggaacgtcttctcatgctccgtgatgcatgaggctctgcacaaccactacacgcanaaaagctntcctgtccccgggtaaatgagtgcgacggccggcaaggccccgttcccgggtttttgggtcgnaccaggatctttggacgtacccgttacttacttnca

SEQ ID NO: 2116 - DNA, 377 bp, Homo sapiens
  misc_feature (3)..(3): n equals a,t,g, or c
  misc_feature (18)..(18): n equals a,t,g, or c
  misc_feature (28)..(28): n equals a,t,g, or c
  misc_feature (263)..(263): n equals a,t,g, or c
  misc_feature (265)..(265): n equals a,t,g, or c
  misc_feature (270)..(270): n equals a,t,g, or c
  misc_feature (313)..(313): n equals a,t,g, or c
  misc_feature (320)..(320): n equals a,t,g, or c
  misc_feature (329)..(329): n equals a,t,g, or c
  misc_feature (365)..(365): n equals a,t,g, or c
  misc_feature (374)..(374): n equals a,t,g, or c
ggnggcgtcttcttcatnaaccggcagngctctagcactgccatgacagtgatggccgacctgggcgagcgcatggtcagggagaacctcaaagtgtggatctatcccgagggtactcgcaacgacaatggggacctgctgccttttaagaagggcgccttctacctggcagtccaggcacaggtgcccatcgtccccgtggtgtactcttccttctcctccttctacaacaccaagaagaaggtcttcactttaagaacagntnacagnggcaagtgctggaagccattcccaccaaagggctcactgtggnggacgtncctgcgctngtggacacctgtcaccgggccatgaggaccaccttncttcacatnttc

SEQ ID NO: 2117 - DNA, 277 bp, Homo sapiens
  misc_feature (6)..(6): n equals a,t,g, or c
  misc_feature (203)..(203): n equals a,t,g, or c
  misc_feature (253)..(253): n equals a,t,g, or c
  misc_feature (267)..(267): n equals a,t,g, or c
  misc_feature (273)..(273): n equals a,t,g, or c
  misc_feature (275)..(275): n equals a,t,g, or c
gaacanatgtggattaagtgtttaggctctatgtggctcacgcagccagaatccttaagtctgtgtgtttctgtgtctcaagactgggctcacattctggctttgtccataacaatgctctgggatttcagggagttccctcatttgtaaaatgagggggtcagagcaggtgatatccatgtttcttccctttctgatattgntgtctgtggcatattctttgtatggcgaatttaataaattacattaatgngtctctttgaaaanaaaaancngg

SEQ ID NO: 2118 - DNA, 590 bp, Homo sapiens
  misc_feature (103)..(103): n equals a,t,g, or c
  misc_feature (189)..(189): n equals a,t,g, or c
  misc_feature (319)..(319): n equals a,t,g, or c
  misc_feature (342)..(342): n equals a,t,g, or c
  misc_feature (380)..(380): n equals a,t,g, or c
  misc_feature (397)..(397): n equals a,t,g, or c
  misc_feature (471)..(471): n equals a,t,g, or c
  misc_feature (477)..(477): n equals a,t,g, or c
  misc_feature (483)..(483): n equals a,t,g, or c
  misc_feature (504)..(504): n equals a,t,g, or c
  misc_feature (518)..(518): n equals a,t,g, or c
  misc_feature (559)..(559): n equals a,t,g, or c
  misc_feature (562)..(562): n equals a,t,g, or c
  misc_feature (584)..(584): n equals a,t,g, or c
ggggacaatctccagcatggcccggcttccctctcctcctcaccctcctcactcactgtgcagggtcctgggcccagtctgtgctgactcagccaccctcagngtctgggacccccgggcagagggtcaccatctcttgttctggaagcagcttcaatgtcggaagtaatcatgtatactggtaccagnagctcccaggagcggtccccaagctcctcatctataggaatgatcagcggcctcaggggtccctgaccgactctctggctacaagtctggcacctcggactccctggcatcagtgggctccggtccgaanatgaggctgattattactggcancatgggatggcagtctcagagcttgctcttcggcgganggaccaaactgaccgtnctggtcagccaaggctgcccctcggcatctgatccgcctctctaggagcttcagccaacaaggccacactgggngctcanaagtgntttaccgggagcgtgcagtgnctgaaggagatagnaccctcaggcggatgagacacacacctcaacaagacacagnacncggcagactactacttaccctncaagaa

SEQ ID NO: 2119 - DNA, 772 bp, Homo sapiens
  misc_feature (12)..(12): n equals a,t,g, or c
  misc_feature (497)..(497): n equals a,t,g, or c
  misc_feature (555)..(555): n equals a,t,g, or c
  misc_feature (622)..(622): n equals a,t,g, or c
  misc_feature (649)..(649): n equals a,t,g, or c
  misc_feature (728)..(728): n equals a,t,g, or c
  misc_feature (730)..(730): n equals a,t,g, or c
  misc_feature (733)..(733): n equals a,t,g, or c
gctaagaaggcnaccagctgtttcccacgccccatgactccccgagaccgacatgaagggcgcaaacagagcactactgaggcccagaagaaagcagctccagcttctactaaacaggctgaccggcgccagtcgatggccttcagcatcctcaacacacccaagaagctagggaacagccttctgcggcggggagcctcaaagaaggccctgtccaaggcttcccccaacactcgcagtggaacccgccgttctccgcgcattgccaccaccacagccagcgccgccactgctgccgccattggtgccacccctcgagccaagggcaaggcaaagcactaaagggccagtaccagtgagtggccccacctgtgtccccgatgctgccgtcacctggtcctcccgcctactgtccctctcagtgccttctctcagctcccaggccaacagtagccaaacccctagagacagtgatgcctgcccgaccctggcctggnccctggtccttcactggcgccttctcggagctggcccagggggcctggagcatggacngtgtgggcgctctccctaccttttgggccccctttccccccttttttttttttttttcccctttttnaaaaaggccaaaaaaggggttccaacntttttcctttcccattcaccaaacccaggaattttgaaggctggttttgaatgggcttgggtccctttgggcccttggncnggnccttcctcttaagcctctggatctagaaagggacccatt

SEQ ID NO: 2120 - DNA, 777 bp, Homo sapiens
  misc_feature (599)..(599): n equals a,t,g, or c
  misc_feature (605)..(605): n equals a,t,g, or c
  misc_feature (616)..(616): n equals a,t,g, or c
  misc_feature (634)..(634): n equals a,t,g, or c
  misc_feature (642)..(642): n equals a,t,g, or c
  misc_feature (657)..(657): n equals a,t,g, or c
  misc_feature (770)..(770): n equals a,t,g, or c
gctgaccagcaccatggcggttggcaagaacaagcgccttacgaaaggcggcaaaaagggagccaagaagaaagtggttgatccattttctaagaaagattggtatgatgtgaaagcacctgctatgttcaatataagaaatattggaaagacgctcgtcaccaggacccaaggaaccaaaattgcatctgatggtctcaagggtcgtgtgtttgaagtgagtcttgctgatttgcagaatgatgaagttgcatttagaaaattcaagctgattactgaagatgttcagggtaaaaactgcctgactaacttccatggcatggatcttacccgtgacaaaatgtgttccatggtcaaaaaatggcagacaatgattgaagctcacgttgatgtcaagactaccgatggttacttgcttcgtctgttctgtgttggttttactaaaaaacgcaacaatcagatacggaagacctcttatgctcagcaccaacaggtccgccaaatccggaagaagatgatggaaatcatgacccgagaggtgcagacaaatgacttgaaagaagtggtcaataaattgattcccaagggaaaccaagggnccaaanttttggggggnaaaaaaaaaaggaaccanttaagggnaaaaaaaagggcccnttttggcccaattcttatttatcctctccatgatggcttcgttagaaaagtaaaaatgctgaagaagcccaagtttgaattgggaaagctcatggagcttcatggggaaagcngtagttc

SEQ ID NO: 2121 - DNA, 737 bp, Homo sapiens
  misc_feature (478)..(478): n equals a,t,g, or c
  misc_feature (505)..(505): n equals a,t,g, or c
  misc_feature (550)..(550): n equals a,t,g, or c
  misc_feature (596)..(596): n equals a,t,g, or c
  misc_feature (602)..(602): n equals a,t,g, or c
  misc_feature (650)..(650): n equals a,t,g, or c
  misc_feature (665)..(665): n equals a,t,g, or c
  misc_feature (675)..(675): n equals a,t,g, or c
  misc_feature (724)..(724): n equals a,t,g, or c
  misc_feature (734)..(734): n equals a,t,g, or c
ggtctgtgctgacgcagccgccctcagtgtctggggccccagggcagagggtcaccatctcctgcactggcagcagctccaacatcggggcaggttatgatgtgcactggtaccaacagcatccaggaacagcccccaaactcctcatcaatggtaacagcaatcggccctcaggggtccctaaccgattctctggctccaagtctggcacctcagcctccctggccatcactgggctccaggctgaggatgaggctgattattactgccagtcctatgacagcaagcctgagtgattcgggagtcttcggaactgggaccaaggtcaccgtcctaagtcagcccaaggccaaccccactgtcactctgttcccgcctcctctgaggagctccaagccaacaaggccacactagtgtgtctgatcaagtgacttctacccgggagcttgtgacagtggcctggaaggcagatggcagncccgtcaaggcgggaagtggagaccancaaacccttccaacagaggcaacaacaagtaccgccggccagcanctacctaacctgacgcccgacaatggaagtcccacagaacttccanttgcangtcacgcatgaaggaacaccgtggagaaaacaggggcccttaccgaanggtataggttccaantttaacccancccgggaggctggagcttaaggatcccagggagggggttttttccaatncaaggatccngcc

SEQ ID NO: 2122 - DNA, 506 bp, Homo sapiens
  misc_feature (23)..(24): n equals a,t,g, or c
  misc_feature (26)..(26): n equals a,t,g, or c
  misc_feature (30)..(30): n equals a,t,g, or c
  misc_feature (39)..(39): n equals a,t,g, or c
  misc_feature (41)..(41): n equals a,t,g, or c
  misc_feature (50)..(50): n equals a,t,g, or c
  misc_feature (67)..(67): n equals a,t,g, or c
  misc_feature (76)..(76): n equals a,t,g, or c
  misc_feature (89)..(90): n equals a,t,g, or c
  misc_feature (98)..(98): n equals a,t,g, or c
  misc_feature (105)..(105): n equals a,t,g, or c
  misc_feature (114)..(114): n equals a,t,g, or c
  misc_feature (128)..(128): n equals a,t,g, or c
  misc_feature (141)..(141): n equals a,t,g, or c
  misc_feature (143)..(143): n equals a,t,g, or c
  misc_feature (159)..(159): n equals a,t,g, or c
  misc_feature (170)..(170): n equals a,t,g, or c
  misc_feature (186)..(186): n equals a,t,g, or c
  misc_feature (242)..(242): n equals a,t,g, or c
  misc_feature (263)..(264): n equals a,t,g, or c
  misc_feature (266)..(266): n equals a,t,g, or c
  misc_feature (279)..(279): n equals a,t,g, or c
  misc_feature (286)..(286): n equals a,t,g, or c
  misc_feature (319)..(319): n equals a,t,g, or c
  misc_feature (334)..(334): n equals a,t,g, or c
  misc_feature (336)..(337): n equals a,t,g, or c
  misc_feature (366)..(366): n equals a,t,g, or c
  misc_feature (368)..(368): n equals a,t,g, or c
  misc_feature (374)..(374): n equals a,t,g, or c
  misc_feature (377)..(377): n equals a,t,g, or c
  misc_feature (401)..(401): n equals a,t,g, or c
  misc_feature (413)..(413): n equals a,t,g, or c
  misc_feature (477)..(477): n equals a,t,g, or c
  misc_feature (488)..(488): n equals a,t,g, or c
  misc_feature (500)..(500): n equals a,t,g, or c
  misc_feature (503)..(503): n equals a,t,g, or c
gctttcttcaccaatctcatgannanaggnaacatgctnanaaactgatnaagctgcacaaccaacnaggtggccnaatcttccttcannatatcaanaaaccanactgtgatnactggcacagcggnctgaatgcaatgnantgtgcattacatttgnaaaaaaatgtnaatcactcactactgnaactgcacaaactggccactgacaaaaatgacccccatttgtgtgacttcattganacacattacctgaatgagcanntnaaagccatcacanaattggntgaccacgtgaccaacttgcgcaagatggcagngccgaatctgcttgncnnaatatctctttgacaaagcacaccctggnanacagtnatnatgaaagctaaccctcggcctaanttcccatagccnggggtgattcctggcacaaggcagtgcatgcatgtgggcttccttaactttttataactgaccnaacatccttangtttttggttgnccnatc

SEQ ID NO: 2123 - DNA, 552 bp, Homo sapiens
  misc_feature (13)..(13): n equals a,t,g, or c
  misc_feature (39)..(39): n equals a,t,g, or c
  misc_feature (76)..(76): n equals a,t,g, or c
  misc_feature (106)..(106): n equals a,t,g, or c
  misc_feature (109)..(109): n equals a,t,g, or c
  misc_feature (121)..(121): n equals a,t,g, or c
  misc_feature (154)..(154): n equals a,t,g, or c
  misc_feature (233)..(233): n equals a,t,g, or c
  misc_feature (289)..(289): n equals a,t,g, or c
  misc_feature (380)..(380): n equals a,t,g, or c
  misc_feature (412)..(412): n equals a,t,g, or c
  misc_feature (429)..(429): n equals a,t,g, or c
  misc_feature (437)..(437): n equals a,t,g, or c
  misc_feature (440)..(440): n equals a,t,g, or c
  misc_feature (482)..(482): n equals a,t,g, or c
  misc_feature (505)..(505): n equals a,t,g, or c
  misc_feature (509)..(509): n equals a,t,g, or c
  misc_feature (515)..(515): n equals a,t,g, or c
  misc_feature (520)..(520): n equals a,t,g, or c
gcgcctgcacagncaggagtatacaacaacatgagcatnaccgtttccatggcaggtggaaatactgaatgttcanaacatgaacccaatgatggcccagatgcanatnagctctttgcanatgccaggaatgaacactgtgtgccctgagcanataaatgatcccgcactgagacacacaggcctctactgcaaccagctctcatccactgaccttctcaaaacagaagcanatggaacccaggacaagaagacagaacagttcttctctgtggtgactacagactanaggaatgctctacaggtgcaacaggttcaggtgtttgctgacgtccagtgtacagtgaatctggtaggcggggacccttacctgaaccagnctggtccactgggaactcaaaagccacgtcangaccacagaccccccancccagcanaanaccttcttcaacagctactgcttgaataaccacttttaaagnaatgggaaattaaataatagacntacngagatntaccnatatatcatataattttctggagaatttttga

SEQ ID NO: 2124 - DNA, 465 bp, Homo sapiens
  misc_feature (1)..(1): n equals a,t,g, or c
  misc_feature (5)..(5): n equals a,t,g, or c
  misc_feature (31)..(31): n equals a,t,g, or c
  misc_feature (56)..(56): n equals a,t,g, or c
  misc_feature (58)..(58): n equals a,t,g, or c
  misc_feature (128)..(128): n equals a,t,g, or c
  misc_feature (148)..(148): n equals a,t,g, or c
  misc_feature (200)..(200): n equals a,t,g, or c
  misc_feature (258)..(258): n equals a,t,g, or c
  misc_feature (281)..(281): n equals a,t,g, or c
  misc_feature (286)..(286): n equals a,t,g, or c
  misc_feature (331)..(331): n equals a,t,g, or c
  misc_feature (373)..(373): n equals a,t,g, or c
  misc_feature (387)..(387): n equals a,t,g, or c
  misc_feature (418)..(418): n equals a,t,g, or c
  misc_feature (460)..(460): n equals a,t,g, or c
  misc_feature (463)..(463): n equals a,t,g, or c
ncagntggacgcctgcaggtaccggccgganttcccgggtcgacccacgcgtccgnanaagtgtccttgttcattttcacccaaatgaagtgtgaacagtgatgttttcggatgcaaactcagctcanggattcattttgtgtcttanctttatatgcatccttatttttaatacacctgcttcacgtccctatgttggnaagtccatatttgtctgcttttcttgcagcatcatttccttacaatactgtctggtgnacaaaatgacaattgatatgctnttctnatataattactttagctgcactaacagtacaatgcttgttaatgnttaatataggcagggcgaatactactttgtaacttttaaagncttaaacttttcantaaaattgagtgagacttataggcccaaaanaaaaaccttaactgaacaaaaaagggggcgcctttttaaagnccncg

SEQ ID NO: 2125 - DNA, 705 bp, Homo sapiens
  misc_feature (4)..(4): n equals a,t,g, or c
  misc_feature (15)..(15): n equals a,t,g, or c
  misc_feature (26)..(26): n equals a,t,g, or c
  misc_feature (56)..(56): n equals a,t,g, or c
  misc_feature (65)..(65): n equals a,t,g, or c
  misc_feature (117)..(117): n equals a,t,g, or c
  misc_feature (130)..(130): n equals a,t,g, or c
  misc_feature (164)..(164): n equals a,t,g, or c
  misc_feature (213)..(213): n equals a,t,g, or c
  misc_feature (219)..(219): n equals a,t,g, or c
  misc_feature (328)..(328): n equals a,t,g, or c
  misc_feature (350)..(350): n equals a,t,g, or c
  misc_feature (357)..(358): n equals a,t,g, or c
  misc_feature (363)..(363): n equals a,t,g, or c
  misc_feature (377)..(377): n equals a,t,g, or c
  misc_feature (402)..(402): n equals a,t,g, or c
  misc_feature (408)..(408): n equals a,t,g, or c
  misc_feature (413)..(413): n equals a,t,g, or c
  misc_feature (418)..(418): n equals a,t,g, or c
  misc_feature (422)..(424): n equals a,t,g, or c
  misc_feature (435)..(435): n equals a,t,g, or c
  misc_feature (444)..(444): n equals a,t,g, or c
  misc_feature (448)..(448): n equals a,t,g, or c
  misc_feature (453)..(453): n equals a,t,g, or c
  misc_feature (458)..(458): n equals a,t,g, or c
  misc_feature (489)..(489): n equals a,t,g, or c
  misc_feature (491)..(491): n equals a,t,g, or c
  misc_feature (507)..(508): n equals a,t,g, or c
  misc_feature (515)..(515): n equals a,t,g, or c
  misc_feature (526)..(526): n equals a,t,g, or c
  misc_feature (544)..(544): n equals a,t,g, or c
  misc_feature (563)..(563): n equals a,t,g, or c
  misc_feature (572)..(572): n equals a,t,g, or c
  misc_feature (574)..(574): n equals a,t,g, or c
  misc_feature (580)..(580): n equals a,t,g, or c
  misc_feature (584)..(584): n equals a,t,g, or c
  misc_feature (586)..(586): n equals a,t,g, or c
  misc_feature (592)..(592): n equals a,t,g, or c
  misc_feature (598)..(598): n equals a,t,g, or c
  misc_feature (617)..(617): n equals a,t,g, or c
  misc_feature (629)..(629): n equals a,t,g, or c
  misc_feature (636)..(636): n equals a,t,g, or c
  misc_feature (645)..(646): n equals a,t,g, or c
  misc_feature (650)..(650): n equals a,t,g, or c
  misc_feature (657)..(657): n equals a,t,g, or c
  misc_feature (659)..(659): n equals a,t,g, or c
  misc_feature (662)..(662): n equals a,t,g, or c
  misc_feature (678)..(678): n equals a,t,g, or c
ccanataccaccagnagaaattgtgntgacacagtctccagccaccctgtctttgnctccagggnaaagagccaccctctcctgcagggccagtcacagtgttagcagctacttagnctggtaccaacanaaacctggccaggctcccaggctcctcatctatnatacatccaacagggccactggcatcccagccaggttcagtggcagtgngtctgngacagacttcactctcaccatcagcagcctacagcctgaacattttgcaccttattactgtcagcaccgtaccaactggccttccggaaaacactttttggccaagggnaccaagcttggagaatcaaacnaactggnngcttncccaatctggcctncaatctttcccgccattcttgaatnaaccancttgnaaaanctgnnnaacttggcctnttcttgggngcgncctgngttgnaataacctttctaatccccaagaacaaggcncnaaaagggtaccagctnncaaaagngtggcattaancgccccctttccaaatcnggggcaaaatttccccaangaaaaaagngntcacanaganancaagcnccacgncaaggggacgggcaccttnaaaggctttaancaagcanccttgaccnnttancccaaancnccnttccgggaaacccccnaggttaaccctggggaaatcccccctt

SEQ ID NO: 2126 - DNA, 468 bp, Homo sapiens
  misc_feature (1)..(1): n equals a,t,g, or c
  misc_feature (23)..(23): n equals a,t,g, or c
  misc_feature (65)..(65): n equals a,t,g, or c
  misc_feature (98)..(99): n equals a,t,g, or c
  misc_feature (108)..(108): n equals a,t,g, or c
  misc_feature (114)..(114): n equals a,t,g, or c
  misc_feature (125)..(126): n equals a,t,g, or c
  misc_feature (139)..(139): n equals a,t,g, or c
  misc_feature (152)..(153): n equals a,t,g, or c
  misc_feature (167)..(168): n equals a,t,g, or c
  misc_feature (192)..(192): n equals a,t,g, or c
  misc_feature (195)..(195): n equals a,t,g, or c
  misc_feature (211)..(212): n equals a,t,g, or c
  misc_feature (216)..(216): n equals a,t,g, or c
  misc_feature (219)..(219): n equals a,t,g, or c
  misc_feature (224)..(224): n equals a,t,g, or c
  misc_feature (230)..(230): n equals a,t,g, or c
  misc_feature (249)..(249): n equals a,t,g, or c
  misc_feature (253)..(253): n equals a,t,g, or c
  misc_feature (257)..(257): n equals a,t,g, or c
  misc_feature (262)..(262): n equals a,t,g, or c
  misc_feature (287)..(287): n equals a,t,g, or c
  misc_feature (298)..(299): n equals a,t,g, or c
  misc_feature (332)..(332): n equals a,t,g, or c
  misc_feature (359)..(359): n equals a,t,g, or c
  misc_feature (386)..(386): n equals a,t,g, or c
  misc_feature (390)..(390): n equals a,t,g, or c
  misc_feature (395)..(395): n equals a,t,g, or c
  misc_feature (431)..(431): n equals a,t,g, or c
  misc_feature (440)..(440): n equals a,t,g, or c
nattaaaccttttctcaacttgngctgcttatatagccaagcttccgtcaataaggcttcattgngactttaacaaacattatcttcccacataccannaactattgnacattnattttacatgnnaaaaattatttgnaataataaagcannaacttttcctgaanntgcaatttatactgtatggcttcnttntcatgcttcatctacnntaanaantgaantataantaaatttggctcgctaaantgtnaagncgctncaattacatgaacataccaccctantaaaggcaaanntctgtaagcttacattgctattgcaaaggttgncttcacagcaatttcacaagctgctgnacttcatggtccccaactaacttggtnaagnctggnactggttccaagacttggacattggaagctgaatgngaacactanttaatggattaaagttcttatggtgcac

SEQ ID NO: 2127 - DNA, 772 bp, Homo sapiens
  misc_feature (361)..(361): n equals a,t,g, or c
  misc_feature (468)..(468): n equals a,t,g, or c
  misc_feature (577)..(577): n equals a,t,g, or c
  misc_feature (593)..(593): n equals a,t,g, or c
  misc_feature (604)..(604): n equals a,t,g, or c
  misc_feature (654)..(654): n equals a,t,g, or c
  misc_feature (681)..(681): n equals a,t,g, or c
  misc_feature (707)..(707): n equals a,t,g, or c
  misc_feature (714)..(721): n equals a,t,g, or c
  misc_feature (729)..(730): n equals a,t,g, or c
  misc_feature (735)..(735): n equals a,t,g, or c
  misc_feature (740)..(740): n equals a,t,g, or c
gcacagcatggacatgagagtcctcgctcagctcctggggctcctgctgctctgtttcccaggtgccagatgtgacatccagatgacccagtctccatcctcactgtctgcatctgtaggagacagagtcaccatcacttgtcgggcgagtcaggccattagcaattctttagcctggtttcagcagaaaccagggaaagcccctaagtccctgatctatgctgcatccagtttgcaaagtggggtcccatcaaagttcagcggcagtggatctgggacagacttcactctcaccatcagcagcctgcagcctgaagattttgcaacttattactgccagcagtatgatacttaacccctnacttttgggggaaggaacaaggtggagatcaaacgactgtgcttgcaccatctgcttcatcttcccgcatctgatgagcagttgaaatctggaactgcctctgttgngtgcctgctgaataacttctatcccagagaggccaaagtacagtggaaggtggataacgccctccaatcgggtaactcccagggagagtgtcacagagcaggacagcanggacagcacctacggnctcagcagcanccttgacgcttagcaaagcagactacgagaaacacaaggtctacgcctgngaagcacccatcaaggcctgagcttgnccgtacaaaaagctttaaccgggganaggtttnnnnnnnngggaagcnnctggntctanttccgctggacccttccaaccttggccttacc

SEQ ID NO: 2128 - DNA, 756 bp, Homo sapiens
  misc_feature (347)..(347): n equals a,t,g, or c
  misc_feature (411)..(411): n equals a,t,g, or c
  misc_feature (427)..(427): n equals a,t,g, or c
  misc_feature (559)..(559): n equals a,t,g, or c
  misc_feature (566)..(566): n equals a,t,g, or c
  misc_feature (573)..(573): n equals a,t,g, or c
  misc_feature (611)..(611): n equals a,t,g, or c
  misc_feature (631)..(631): n equals a,t,g, or c
  misc_feature (643)..(643): n equals a,t,g, or c
  misc_feature (699)..(699): n equals a,t,g, or c
  misc_feature (722)..(722): n equals a,t,g, or c
  misc_feature (730)..(730): n equals a,t,g, or c
  misc_feature (739)..(739): n equals a,t,g, or c
gcggacgcgtgggtttttttttaaagctacaatatctttctcccccaagggaaatgatgtgcccagcatagtcaagacagacaagagggagctcccatggctgagttggggcctcaagccctccctctactcctcctcagagaccaggggtgacagagacagatcttgaaaaccttgggacaagtgcccttgggctgcagggttgggaacggggggagcatggccagcctatcacctggtgtgccctcaggtgaaggaatacgactccatctcccggctggaccagtggctcaccaccatgctgctgcgcatcaagaagaccatccagggcgattaggaggacctgnggcttaaccccaccaagcccccaagggccggttttcttgccaatctgctcaaagagaggtgggnccgagacttgctgganagcttccctcctttcccatctggggaagtcccgcgggccacagtgggcaggtgggcaccgggggtcaagcatgcaaggggccgccagaggcccaggcttgcttggcccggacaggtcaccctctggtcttgnttacatncctttgnccctgggccatttaatttaagccccataggtgcccttnaccccaaaaccagttgtacngaaactttgatnccgacctattggctagggtgctgccgggattggggcaagaatttggccctattctnacagttagcctgagccgttcttntttttcanttggcccanccagtttaagccatgag

SEQ ID NO: 2129 - DNA, 766 bp, Homo sapiens
  misc_feature (354)..(354): n equals a,t,g, or c
  misc_feature (362)..(362): n equals a,t,g, or c
  misc_feature (411)..(411): n equals a,t,g, or c
  misc_feature (432)..(432): n equals a,t,g, or c
  misc_feature (454)..(454): n equals a,t,g, or c
  misc_feature (525)..(525): n equals a,t,g, or c
  misc_feature (626)..(626): n equals a,t,g, or c
  misc_feature (689)..(689): n equals a,t,g, or c
  misc_feature (695)..(695): n equals a,t,g, or c
  misc_feature (724)..(724): n equals a,t,g, or c
  misc_feature (726)..(726): n equals a,t,g, or c
  misc_feature (739)..(739): n equals a,t,g, or c
gcggacgcgtgggcggacgcgtggggggaggtggcacttttgatgtgtcaatcctcactattgaggatggaatctttgaggtcaagtctacagctggagacacccacttgggtggagaagattttgacaaccgaatggtcaaccattttattgctgagtttaagcgcaagcataagaaggacatcagtgagaacaagagagctgtaagacgcctccgtactgcttgtgaacgtgctaagcgtaccctctcttccagcacccaggccagtattgagatcgattctctctatgaaggaatcgacttctatacctccattacccgtgcccgatttgaagaactgaatgctgacctgnttcggggnacctggaacccagtaaagaaaggcctttcgagaatgccaaattagacangtcacagattcatgatattgncctggttggtggttctactcgnatcccaagattcagaagcttctccaagacttcttcaatggaaaagactgaataagagcatcaaccctgatnaagctgttgcttatggtgcacttgtcaggcagccatcttgctggagacaagtctgagaatgtcaagaattgctgtcttggatgcactcctcttttcctggnaatgaactgctggtggagcatgatgtctcaataagcgaataccacattctaccagcagacccngacttntactatttgacaccagctggggctaatcngntataagcacggcntgcaggtacactgttgaagttgctcag

SEQ ID NO: 2130 - DNA, 782 bp, Homo sapiens
  misc_feature (32)..(32): n equals a,t,g, or c
  misc_feature (179)..(179): n equals a,t,g, or c
  misc_feature (381)..(381): n equals a,t,g, or c
  misc_feature (555)..(555): n equals a,t,g, or c
  misc_feature (620)..(620): n equals a,t,g, or c
  misc_feature (649)..(649): n equals a,t,g, or c
  misc_feature (656)..(656): n equals a,t,g, or c
  misc_feature (689)..(689): n equals a,t,g, or c
  misc_feature (724)..(724): n equals a,t,g, or c
  misc_feature (738)..(738): n equals a,t,g, or c
  misc_feature (758)..(758): n equals a,t,g, or c
  misc_feature (770)..(770): n equals a,t,g, or c
ggccctgtccctcttgattgctgatgtctggnttattgttggtgccacagtggacaccacggtgaacccttctggagtctgcacagctgctgtgttctttacacacttcttctacctctctttgttcttctggatgctcatgcttggcatcctgctggcttaccggatcatcctcgtgntccatcacatggcccagcatttgatgatggctgttggattttgcctgggttatgggtgccctctcattatatctgtcattaccattgctgtcacgcaacctagcaatacctacaaaaggaaagatgtgtgttggcttaactggtccaatggaagcaaaccactcctggcttttgttgtccctgcactggctattgtggctgngaacttcgttgtggtgctgctagttctcacaaagctctggaggccgactttggggaaagactgagtcgggatgacaaggccaccatcatccgcgtggggaagagcctcctcattctgacccctctgctagggctcacctggggctttggaataggaacaatagtggacaagccngaatcttgcttggcatggtaatttttgctttactcaatgcattccagggaatcgttcgaacttangcttttggaaaactcttggacaggtaacntgcgacnacttttggttcaaccaaggtggctggccttaangttcttgggaagccaaccggaaaaagccaaaactncattcacaattaanctggccaaaccccaaaattnttcaaaagcccnttttaaaccccc

SEQ ID NO: 2131 - DNA, 728 bp, Homo sapiens
  misc_feature (265)..(265): n equals a,t,g, or c
  misc_feature (374)..(374): n equals a,t,g, or c
  misc_feature (457)..(457): n equals a,t,g, or c
  misc_feature (483)..(483): n equals a,t,g, or c
  misc_feature (533)..(533): n equals a,t,g, or c
  misc_feature (544)..(544): n equals a,t,g, or c
  misc_feature (554)..(555): n equals a,t,g, or c
  misc_feature (572)..(572): n equals a,t,g, or c
  misc_feature (578)..(578): n equals a,t,g, or c
  misc_feature (605)..(605): n equals a,t,g, or c
  misc_feature (614)..(614): n equals a,t,g, or c
  misc_feature (618)..(618): n equals a,t,g, or c
  misc_feature (640)..(640): n equals a,t,g, or c
  misc_feature (653)..(653): n equals a,t,g, or c
  misc_feature (665)..(665): n equals a,t,g, or c
  misc_feature (678)..(678): n equals a,t,g, or c
  misc_feature (692)..(692): n equals a,t,g, or c
gcggacgcgtgggtcctggcttaaagggacacaatggattgcaaggtctgcctggtatcgctggtcaccatggtgatcaaggtgctcctggctccgtgggtcctgctggtcctaggggccctgctggtccttctggccctgctggaaaagatggtcgcactggacatcctggtacagttggacctgctggcattcgaggccctcagggtcaccaaggccctgctggcccccctggtccccctggccctcctggacctccaggtgnaagcggtggtggttatgactttggttacgatggagacttctacagggctgaccaagcctcgctcagcaccttctctcaacccaaggactatgaacttgatgctactctnaagtctctcaacaaccagattgagacccttcttactcctgaaggctctagaaagaacccagttcgcacatgcccgtgacttgngactcagccacccagagtggaaccantggttactactgggatttggaccctaacccaagggatgccactatgggantgcttattcanaggtaatacnnggggaatttcttctacngggcgnaaaacctggtaatcccggggccccaanccttgaaangacngtccccaaaccccaagaaactnggttataaggaanctttcccagggnaccaaggaaaacnccgtctggggcttngggaaaaaaacctattcaatgcttggccagcccagg

SEQ ID NO: 2132 - DNA, 760 bp, Homo sapiens
  misc_feature (411)..(411): n equals a,t,g, or c
  misc_feature (424)..(424): n equals a,t,g, or c
  misc_feature (451)..(451): n equals a,t,g, or c
  misc_feature (497)..(497): n equals a,t,g, or c
  misc_feature (513)..(513): n equals a,t,g, or c
  misc_feature (523)..(523): n equals a,t,g, or c
  misc_feature (573)..(573): n equals a,t,g, or c
  misc_feature (603)..(603): n equals a,t,g, or c
  misc_feature (631)..(631): n equals a,t,g, or c
  misc_feature (646)..(646): n equals a,t,g, or c
  misc_feature (706)..(706): n equals a,t,g, or c
  misc_feature (710)..(710): n equals a,t,g, or c
  misc_feature (729)..(729): n equals a,t,g, or c
  misc_feature (751)..(751): n equals a,t,g, or c
  misc_feature (760)..(760): n equals a,t,g, or c
ggtggcatagttgtttctatctgatttctccagaatttggaaactatttgtgagtattcttaacttatggcaatacagttatttgcataagtgcagtaagaatctgttttcatttgtaacaggacacatttggagaatttggttattttaccaaggctttgactggaatcatgtgctttccttataaggaatcaaacttgacttacggagccaataaagcccttggaaaaactggcctcatattctgtatacacagtccctgtaagtaaagaatatcactttttgacaagtgcagacgccccaggtttatcttgggccctcaaaaggagaggaaatttcacccaactcatgggtatttaatggcataaatccatggctcggctgggttttacgggttttacaaaggcttanctgagaattctgntatgggaccaaggttccttcgggcctncttaaaagcctaagtaaaaaataatcattcttggtggaattggatncaaatagttaggccangtataataancaaaccaatcctaccatgattggctttagtaatatgcgaacttgaagagngaaaaacaaattatcttctaaaacaattgnacacctggtgggtagaggctagccttgnctaatttttttcaantttaataatttttctagaggttggactggaaatctaaattttcttgggtacaagcctttnaaanaagggtttcaaattttttnccttcttttttttttcccaaantttcccaan

SEQ ID NO: 2133 - DNA, 661 bp, Homo sapiens
  misc_feature (406)..(406): n equals a,t,g, or c
  misc_feature (409)..(409): n equals a,t,g, or c
  misc_feature (420)..(420): n equals a,t,g, or c
  misc_feature (429)..(429): n equals a,t,g, or c
  misc_feature (432)..(432): n equals a,t,g, or c
  misc_feature (437)..(437): n equals a,t,g, or c
  misc_feature (454)..(454): n equals a,t,g, or c
  misc_feature (478)..(478): n equals a,t,g, or c
  misc_feature (516)..(516): n equals a,t,g, or c
  misc_feature (522)..(522): n equals a,t,g, or c
  misc_feature (541)..(541): n equals a,t,g, or c
  misc_feature (609)..(609): n equals a,t,g, or c
  misc_feature (630)..(630): n equals a,t,g, or c
  misc_feature (640)..(640): n equals a,t,g, or c
  misc_feature (646)..(646): n equals a,t,g, or c
  misc_feature (660)..(660): n equals a,t,g, or c
gctcgcactctgttcttccgccgctccgccgtcgcgtttctctgccggtcgcaatggaagaagagatcgccgcgctggtcattgacaatggctccggcatgtgcaaagctggttttgctggggacgacgctccccgagccgtgtttccttccatcgtcgggcgccccagacaccagggcgtcatggtgggcatgggccagaaggactcctacgtgggcgacgaggcccagagcaagcgtggcatcctgaccctgaagtacccctttgagcatggcatcgtcaccaactgggacgacatggagaagatctggcaccacaccttctacaacgagctgcgcgtggccccggaggaagcacccagtgctgctgaccgaggccccctgaaccccaaggcaacagagagganatnactcaaaatantgtttgganacnttaanaccccggccatgaacgnggccatccaggccgggttgccctntacgcctttggccgcaccactggcaattgcaaggactntggaanacggggtcacccacacggngcccatctacgagggctacgcccttccccacgccatcctgcgtctggacctggctggccggacctgancgatacttatgaagatcttantgagcgaggntacggnttaacaacacggcna

SEQ ID NO: 2134 - DNA, 737 bp, Homo sapiens
  misc_feature (293)..(293): n equals a,t,g, or c
  misc_feature (495)..(495): n equals a,t,g, or c
  misc_feature (528)..(528): n equals a,t,g, or c
  misc_feature (621)..(621): n equals a,t,g, or c
  misc_feature (677)..(677): n equals a,t,g, or c
  misc_feature (690)..(690): n equals a,t,g, or c
  misc_feature (703)..(703): n equals a,t,g, or c
  misc_feature (710)..(710): n equals a,t,g, or c
  misc_feature (722)..(722): n equals a,t,g, or c
  misc_feature (726)..(726): n equals a,t,g, or c
  misc_feature (730)..(730): n equals a,t,g, or c
gcgacttaagacttcttttggtcagtttttgcatcaattctgcatattgtatccctgatcctgtctaccttcctagaaacttgggtttctatcacaagggcttccagggatgagtttgggagtgtcagtcctagcatgactgcataattggcaaaataacactgaacacatctcctttagggtagtgggcccacactgtaaccccctcatatgaatgatgacacaatattactagtgtgcaaaaagaaacttagagtcataggtatactgacagtgtctgcattcttttaagnttttattattgaaatttctagacttatgtaaaagtagagagcatggtatcatggatcctcatgtattcattagtcagcttcaataattatcaacttatagtgacattctattattaacaataatagttaatacttagtgtctagtatgataggggctgtgaatagatttttctgtggcagaactgaaactgtgacttactgnctttatattctccatatcacttagcatagctgntggcaagtagtagttggtcaagtaagcattgaaagaattcatttgcttaattaatcatccattcagcaaacatggagtaccctcttaaggacncaatgctgaatctgggatataaggttgaataagggaatacgtgggccatattttcnagaagctgggggnctattaaaagganttactgncggcccgggccncggnggcnttgggcc

SEQ ID NO: 2135 - DNA, 759 bp, Homo sapiens
  misc_feature (1)..(2): n equals a,t,g, or c
  misc_feature (5)..(5): n equals a,t,g, or c
  misc_feature (131)..(131): n equals a,t,g, or c
  misc_feature (144)..(144): n equals a,t,g, or c
  misc_feature (159)..(159): n equals a,t,g, or c
  misc_feature (706)..(706): n equals a,t,g, or c
  misc_feature (710)..(710): n equals a,t,g, or c
  misc_feature (717)..(717): n equals a,t,g, or c
  misc_feature (723)..(723): n equals a,t,g, or c
  misc_feature (726)..(726): n equals a,t,g, or c
nnggncagctgtgatgagttgataccagagtatctcaattttatccgtggtgtggttgactctgaggatctgcccctgaacatctcccgagaaatgctccagcagagcaaaatcttgaaagtcattcgcanaaacattgttaanaagtgccttgagctnttctctgagctggcagaagacaaggagaattacaagaaattctatgaggcattctctaaaaatctcaagcttggaatccacgaagactccactaaccgccgccgcctgtctgagctgctgcgctatcatacctcccagtctggagatgagatgacatctctgtcagagtatgtttctcgcatgaaggagacacagaagtccatctattacatcactggtgagagcaaagagcaggtggccaactcagcttttgtggagcgagtgcggaaacggggcttcgaggtggtatatatgaccgagcccattgacgagtactgtgtgcagcagctcaaggaatttgatgggaagagcctggtctcagttaccaaggagggtctggagctgcctgaggatgaggaggagaagaagaagatggaagaaagcaagggcaaaggtttgaagaacctctgcaagctcatgaaaggaaaatcttagattaagaaaggtttgagaaaggtgacaatcttccaataagactttggggcctttaacccttgctgcaattggngaanccagcancttacnggnttgggaccagggcccaataattggaaaccggga

SEQ ID NO: 2136 - DNA, 670 bp, Homo sapiens
  misc_feature (7)..(7): n equals a,t,g, or c
  misc_feature (20)..(20): n equals a,t,g, or c
  misc_feature (74)..(74): n equals a,t,g, or c
  misc_feature (181)..(181): n equals a,t,g, or c
  misc_feature (192)..(192): n equals a,t,g, or c
  misc_feature (264)..(264): n equals a,t,g, or c
  misc_feature (281)..(281): n equals a,t,g, or c
  misc_feature (354)..(354): n equals a,t,g, or c
  misc_feature (376)..(376): n equals a,t,g, or c
  misc_feature (500)..(500): n equals a,t,g, or c
  misc_feature (525)..(525): n equals a,t,g, or c
  misc_feature (539)..(539): n equals a,t,g, or c
  misc_feature (555)..(555): n equals a,t,g, or c
  misc_feature (600)..(600): n equals a,t,g, or c
  misc_feature (624)..(624): n equals a,t,g, or c
  misc_feature (628)..(628): n equals a,t,g, or c
  misc_feature (634)..(634): n equals a,t,g, or c
  misc_feature (659)..(659): n equals a,t,g, or c
gcctggnacaccgccggcgnggagagaagcggatcccgtccgagccccggccccaagtaacgccgccgccccgnagccgccttggaggtccccctccccactaagtgcctctttgcatagcaccagtccccacccgcacgctctctggaccactacagctggacgggcaatggcgggtcgntggaggcgcancacgacccaatggaccagctgctgggaacaagatctgtcaatttaagctggttctgctgggggagtctgcgntaggcagatccagcctngtcctccgctttggaaggacagttacgagaccagagagacaattgagcgccttctaacagactgctgctgatncacaacagtaagttgaatctgnacacagtgacagggcgtatcacagctgcccccatgtactatcggggggccatgctgcatcgtggctatgacatcaccaacacagatacatttgcacgggccaagaactgggtgaaggagctacngaggcaaggccagacccaacatcgncattgcacttcgcngggttaacaaaggcanaaccttggccagcaaggaagaagcccctgggaaaatttcccgggnaaagcccccaaaggccccttattngccngaaccnaaccaaccccgggttttggcttggnttccattgggg

SEQ ID NO: 2137 - DNA, 611 bp, Homo sapiens
  misc_feature (16)..(16): n equals a,t,g, or c
  misc_feature (581)..(581): n equals a,t,g, or c
  misc_feature (584)..(584): n equals a,t,g, or c
  misc_feature (598)..(598): n equals a,t,g, or c
  misc_feature (605)..(605): n equals a,t,g, or c
  misc_feature (611)..(611): n equals a,t,g, or c
gaactcccccttgctntaatccgactcactatagggaaagctggtacgcctgcaggtaccggtccggaattcccgggtcgacccacgcgtccggttctttgaagtgatggtagccgggaagttgattcactctaagaagaaaggcgatggctacgtggacacagaaagcaagtttctgaagttggtggccgccatcaaagccgccttggctcagggctaatgcgccctgaaggcagagtccagggaccttgacccagcccctctcagcagacgcttcatgataggaaggactgaaaagtcttgtggacacctggtttttccctgatgttctcgtggctgctgttgggggcagagattgacgcccccggtctttgcctctgagccggaagctgtggatgtgcttccgatcaacacccactctctgccgggtcataattttgaacagcttccagtgcctgagttggggactccgctagcatctctaagggaagcagagagcataagatggtgggttctgattgtgcaacgttgcaccgtcacgattaataaatattggatgaattaaccgaaaaaaaaaaaanggncgccgttttaaagnatcccangttacn

SEQ ID NO: 2138 - DNA, 722 bp, Homo sapiens
  misc_feature (411)..(411): n equals a,t,g, or c
  misc_feature (415)..(415): n equals a,t,g, or c
  misc_feature (475)..(475): n equals a,t,g, or c
  misc_feature (477)..(477): n equals a,t,g, or c
  misc_feature (526)..(526): n equals a,t,g, or c
  misc_feature (546)..(546): n equals a,t,g, or c
  misc_feature (622)..(622): n equals a,t,g, or c
  misc_feature (644)..(644): n equals a,t,g, or c
  misc_feature (661)..(661): n equals a,t,g, or c
  misc_feature (664)..(664): n equals a,t,g, or c
  misc_feature (669)..(669): n equals a,t,g, or c
  misc_feature (673)..(673): n equals a,t,g, or c
  misc_feature (719)..(719): n equals a,t,g, or c
ggcccagtcgaaggcccaggatggcttttgctgcggccccgtggggtaggagggacagagagacagggagagtcagcctccacattcagaggcatcacaagtaatggcacaattcttcggatgactgcagaaaatagtgttttgtagttcaacaactcaagacgaagcttatttctgaggataagctctttaaaggcaaagctttattttcatctctcatcttttgtcctccttagcacaatgtaaaaaagaatagtaatatcagaacaggaaggaggaatggcttgctggggagcccatccaggacactgggagcacatagagattcacccatgtttgttgaacttagagtcattctcatgcttttctttataattcacacatatatgcagagaagatatggtcttggtnacantggatacaccttagcccccaaatatagtaggatctatactaagataatcctagatgaaangntagagatgctatatgatacaactgtggccatgactgaggaaaggagctnacgcccagagactgggctgntcttccggaggccaaacccaagaaggtctggcaaagtcaggcttagggagactctgcctgctgcagaacttggtgngacacacgcttgcatagagctntccttgaaacagagggnctnaaganattntgctactataacttttcttaatttttaacttttggggggaaagganttt

SEQ ID NO: 2139 - DNA, 742 bp, Homo sapiens
  misc_feature (412)..(412): n equals a,t,g, or c
  misc_feature (496)..(496): n equals a,t,g, or c
  misc_feature (509)..(509): n equals a,t,g, or c
  misc_feature (613)..(613): n equals a,t,g, or c
  misc_feature (618)..(618): n equals a,t,g, or c
  misc_feature (679)..(679): n equals a,t,g, or c
  misc_feature (699)..(699): n equals a,t,g, or c
  misc_feature (725)..(725): n equals a,t,g, or c
  misc_feature (728)..(728): n equals a,t,g, or c
  misc_feature (732)..(732): n equals a,t,g, or c
gaggaactggcacttggagtccggacatctgaaacttgtttattctagtgggcctaaccaccgagaccatccttaaacatcagtagactgggagctgtacatggatgggagcagcttcaccaacccctgcaaagtgactctgaagaagacgacaagccctgctccagtcacacccggaagctgactggtccacgcacagctgaagcatgaggaaactcatcgcgggactaattttccttaaaatttagacttgcacagtaaggacttcaactgaccttcctcagactgagaactgtttccagtatatacatcaagtcactgaggaaacgaggtaactgatggacaagccgaggcagccccttaggcggcttaagccttccctgtggagcattccttaagcggcttcggccangcccgaatgacgcgatccaaagaagcactccgggtaggaaattgccccggtggaatgcctcaccagagcagcgtgtagcaattnccttgtggaggantaacacagtggcttgaacaccgggaaggaactggcacttggagtcccggacatcttgaaacttgagaacatcaccacccttgaagcccgagactaacacttgangactnaacaaggactatttaagaaacactggaggattaagaacaacttttccacaagtccttggancttttctggcatgcttaagncctataattcaacggggataactggnttnccanaaggaggacg

SEQ ID NO: 2140 - DNA, 564 bp, Homo sapiens
  misc_feature (1)..(1): n equals a,t,g, or c
  misc_feature (442)..(442): n equals a,t,g, or c
ngcaggtgaccttttccatcgtgagctaagagaaggttaggaggcctgaggggcgggccttgtgtcccctcctccccctccacagcccctgaggtggagcttccctcacagaccccatctggtcgagcctacggctgcccagtgtacactcagtgatgcttataccaaatagggcatgtgcgctggtgtctgttggggacagccccatccctaccttggagtcggcagagaagcagcaataagcattaggcgaatgattgaaagggctgctgcgccaagaggccttcagtccccttaacgtggctttccaacttcctgacgaggctacaaaggctccgctcacaaaagaaagccaataatgtaaataaatagaaaacgaagcctccacgcgtggtttttaaagggggatgatgaatgtgacaccacccacagaatgcattanaatctgggttttctggctttgcattttactctgataggaaattttggtactaactttgtgcataacttaattaatggactggataaatgaacccaaactggtaaatatggatttaagttggt

SEQ ID NO: 2141 - DNA, 565 bp, Homo sapiens
  misc_feature (1)..(1): n equals a,t,g, or c
  misc_feature (514)..(514): n equals a,t,g, or c
  misc_feature (518)..(518): n equals a,t,g, or c
  misc_feature (540)..(540): n equals a,t,g, or c
  misc_feature (542)..(542): n equals a,t,g, or c
  misc_feature (561)..(561): n equals a,t,g, or c
  misc_feature (565)..(565): n equals a,t,g, or c
ncagcggcgaccggagcggtaggagcagcaatttatccgtgtgcagccccaaactggaaagaagatgctaattaaagtgaagacgctgaccggaaaggagattgagattgacattgaacctacagacaaggtggagcgaatcaaggagcgtgtggaggagaaagagggaatccccccacaacagcagaggcttatctacagtggcaagcagatgaatgatgagaagacagcagctgattacaagattttaggtggttcagtccttcacctggtgttggctctgagaggaggaggtggtcttaggcagtgatggaccctccattttacctctttaccctgtcgctcataatgaggcatcatatatcctctcactctctgggacaccatagccactgccccctcccctggatgcccagtaatgtatgtctactggtgggagactgtgaggatcccaggattcaagtattcctggcccaaagggcccttgctgctactgggtggtaagtttgcaagnctgngtgcttcctctcttatgactgngnccctggttgcaataaaaanttcn

SEQ ID NO: 2142 - DNA, 661 bp, Homo sapiens
  misc_feature (488)..(488): n equals a,t,g, or c
  misc_feature (495)..(495): n equals a,t,g, or c
  misc_feature (497)..(497): n equals a,t,g, or c
  misc_feature (524)..(524): n equals a,t,g, or c
  misc_feature (531)..(531): n equals a,t,g, or c
  misc_feature (540)..(540): n equals a,t,g, or c
  misc_feature (544)..(545): n equals a,t,g, or c
  misc_feature (548)..(548): n equals a,t,g, or c
  misc_feature (564)..(564): n equals a,t,g, or c
  misc_feature (582)..(582): n equals a,t,g, or c
  misc_feature (586)..(586): n equals a,t,g, or c
  misc_feature (604)..(604): n equals a,t,g, or c
  misc_feature (642)..(642): n equals a,t,g, or c
ggagagcttcagggacctggacccagagcaaggacacaccgtttatgccaaaaagctgtggacggcccctgagctcctgcgaatggcttcaccccctgtgcggggctcccaggctggtgacgtatacagctttgggatcatccttcaggagattgccctgaggagtggggtcttccacgtggaaggtttggacctgagccccaaagagatcatcgagcgggtgactcggggtgagcagccccccttccggccctccctggccctgcagagtcacctggaggagttggggctgtcatgcagcggtgctggctgaggacccacaggagaggccaccattccagcagatccgcctgacgttgcgcaaatttaacagggagaacagcagcaacatcctggacaacctgctgtcccgcatggagcagtacgcgaacaatctggaggaactggtggaggaacggacccaggcatacctggaggaaaaacccaanggttgangnccttggttttaccaaaatcctggcttnacttaangggcttgancaannttnaaaccctgggggaaanaccggttccaaggccccnaaanccctttttgacaaggggnttacccattttaacttttaaggggaccatttggggggnttttcaaaaagggcttttt

SEQ ID NO: 2143 - DNA, 511 bp, Homo sapiens
  misc_feature (494)..(494): n equals a,t,g, or c
  misc_feature (497)..(497): n equals a,t,g, or c
  misc_feature (502)..(502): n equals a,t,g, or c
  misc_feature (508)..(508): n equals a,t,g, or c
  misc_feature (510)..(510): n equals a,t,g, or c
gaatttctgcagttgggagatgttcagcttcagtccctggccctatggccgttcttttccaccctgtttcttcccccataggaagaacccacctgtagccctgaggttcttttcccaggatggctccaggataaggatcactgtaggtggttgtggagttgacacccctgttgactccttcccagctgattgtcagagccttagacccagcacgccttggattagctctgcagagtgtcttggttgagagaataacctcaccgtacccacatgacacgtgatttggaaagagactagaggccacacttgataaatcatggggaacagatgtgttccacccaacaaatgtgataagtgatcgtgcagccagagccagccttccttcaatcaaggtttccaggcagagcaaataccctagagattctctgtgatataggaaatttggatgaagggagctagaagaaatacagggatttttttttttttttaaaaanggngtctnactctntng

SEQ ID NO: 2144 - DNA, 669 bp, Homo sapiens
  misc_feature (418)..(418): n equals a,t,g, or c
  misc_feature (474)..(474): n equals a,t,g, or c
  misc_feature (476)..(476): n equals a,t,g, or c
  misc_feature (562)..(562): n equals a,t,g, or c
  misc_feature (570)..(570): n equals a,t,g, or c
  misc_feature (594)..(594): n equals a,t,g, or c
  misc_feature (625)..(625): n equals a,t,g, or c
  misc_feature (631)..(631): n equals a,t,g, or c
  misc_feature (662)..(662): n equals a,t,g, or c
gcgaagccccgggctttttcctggacctggagcccatcccgggagccttggacgctgtgcgggagatgaacgacctaccggacacgcaggtcttcatctgcaccagccccctgctgaagtaccaccactgtgtgggtgagaagtaccgctgggtggagcagcacctggggccccagttcgtagaacgaattatcctgacaagggacaagacggtggtcttgggggacctgctcattgatgacaaggacacagttcgaggccaggaggagaccccaagctgggagcacatcttgttcacctgctgccacaatcggcacctggtcctgcccccgacaaggagacggctgctctcctggagtgacaactggagggagatcttagatagcaagcgcggagctgcgcagcgggaatgagcggngatgccgcgggcagcagctggagctaaaggaagggcaggcccacaggggccaccgnanagccgagtcggggcggcatcgtgctggtgcctctgccccgtggagtggagcaggcagatccgttaaagcgctgtgctaccggcccnagcccagnacccggtaccttccgagaggctgncctggaccctgctgcatggaaatacagtggnaaaacnagtcgggacctttataaaagaccttgctttntaaaaaa

SEQ ID NO: 2145 - DNA, 742 bp, Homo sapiens
  misc_feature (208)..(208): n equals a,t,g, or c
  misc_feature (215)..(215): n equals a,t,g, or c
  misc_feature (318)..(318): n equals a,t,g, or c
  misc_feature (328)..(328): n equals a,t,g, or c
  misc_feature (429)..(429): n equals a,t,g, or c
  misc_feature (580)..(581): n equals a,t,g, or c
  misc_feature (604)..(604): n equals a,t,g, or c
  misc_feature (656)..(656): n equals a,t,g, or c
  misc_feature (682)..(682): n equals a,t,g, or c
  misc_feature (714)..(714): n equals a,t,g, or c
  misc_feature (718)..(718): n equals a,t,g, or c
  misc_feature (732)..(732): n equals a,t,g, or c
gggagcttgctgcctcctgccttgctacactaatgtttacagcacctaagcttagcctccagggccccacctctcccagctgatggtgagctgacagtgtccacaggttccaggaccatttgagattggaagctacactcaaagacactcccaccaggctctttctcccttttcctcttgctcactgccctggaatcaacaggctggntgctggntagattttctgaaacaggaggtaaaatttttctttggcagaggcccctaagcaagggaggggtgttggagagccagtgcccttaagactggagaaagctgcantttaccaagntgccttttgccactgtagctgaccaggggactaggttgtagaggtgggaaggccccctctgggctgatcttgtgccattcttgaccttggacctgcttggntaaggagggagtgggccagaccagagtgccaggagctaatggagccaggcctgactcctaggagtggtccaaaggccttcagcctagatggtgcaaagctggggccagcctgtcttcaccggcaccctcacctgtgacaccaagacccacnncaatcccagacttcacacagtantctcccccacgccgtctatgacccaaggcccctgccaggtgtgggccacagnataggtatgtgtgaaagcaacgtaanggccccggggactggaatgcgcttaagccaantcancttccttctcttangccaagcctg

SEQ ID NO: 2146 - DNA, 816 bp, Homo sapiens
  misc_feature (1)..(2): n equals a,t,g, or c
  misc_feature (9)..(9): n equals a,t,g, or c
  misc_feature (12)..(12): n equals a,t,g, or c
  misc_feature (14)..(14): n equals a,t,g, or c
  misc_feature (435)..(435): n equals a,t,g, or c
  misc_feature (454)..(454): n equals a,t,g, or c
  misc_feature (500)..(500): n equals a,t,g, or c
  misc_feature (515)..(515): n equals a,t,g, or c
  misc_feature (539)..(539): n equals a,t,g, or c
  misc_feature (553)..(553): n equals a,t,g, or c
  misc_feature (599)..(599): n equals a,t,g, or c
  misc_feature (609)..(609): n equals a,t,g, or c
  misc_feature (615)..(615): n equals a,t,g, or c
  misc_feature (620)..(620): n equals a,t,g, or c
  misc_feature (624)..(624): n equals a,t,g, or c
  misc_feature (634)..(634): n equals a,t,g, or c
  misc_feature (637)..(639): n equals a,t,g, or c
  misc_feature (649)..(649): n equals a,t,g, or c
  misc_feature (652)..(652): n equals a,t,g, or c
  misc_feature (692)..(692): n equals a,t,g, or c
  misc_feature (695)..(695): n equals a,t,g, or c
  misc_feature (698)..(698): n equals a,t,g, or c
  misc_feature (703)..(703): n equals a,t,g, or c
  misc_feature (737)..(737): n equals a,t,g, or c
  misc_feature (775)..(775): n equals a,t,g, or c
  misc_feature (792)..(792): n equals a,t,g, or c
  misc_feature (809)..(810): n equals a,t,g, or c
nnctccgtntgnanacgccccactatagggatagctggtacgcctgcaggtaccggtccggaattcccgggtcgacccacgcgtccgtgatgctcctcaagaaatgggagatgaaaatgcggagataacggaggagatgatggatcaggcaaatgataaaaaagtggctgctattgaagccctaaatgatggtgaactccagaaagccattgacttattcacagatgctatcaagctgaatcctcgcttggccattttgtatgccaagagggccagtgtcttcgtcaaattacagaagccaaatgctgccatccgagactgtgacagagccattgaaataaatcctgattcaagctcagccttacaagtggcgggggaaagcacacagacttctaggccactgggaagaagcagcccatgatcttgccttgctgnaaattggattatgatgaanatgctagtgcaatgcttaaagaagttcaacctaaggcacagaaaantgcagaacatcgganaaagtatgaaccgaaaacctgaanaaccgagagatcanagaaaggaatagaacgaggtaagaaagcttcgagaagaaccttganaaaagccccnaagganggaanaaancccgacaaanggnnnggaacttaanatngggtttttttccaggggggttttcctgggggaaaagcccnggnaanttttnccgggaggaaaggcctggaaatgggaaaggggcntttccccggaaaaggcttggaaaggcccgggcctcaanggaaatttttaaggggncccaaaggttttttganncctttc

SEQ ID NO: 2147 - DNA, 777 bp, Homo sapiens
  misc_feature (601)..(601): n equals a,t,g, or c
  misc_feature (643)..(643): n equals a,t,g, or c
  misc_feature (678)..(678): n equals a,t,g, or c
  misc_feature (730)..(730): n equals a,t,g, or c
  misc_feature (743)..(743): n equals a,t,g, or c
  misc_feature (767)..(767): n equals a,t,g, or c
ggtcttccccctggcgccctgctccaggagcacctccgagagcacagcggccctgggctgcctggtcaaggactacttccccgaaccggtgacggtgtcgtggaactcaggcgctctgaccagcggcgtgcacaccttcccggctgtcctacagtcctcaggactctactccctcagcagcgtggtgaccgtgacctccagtaacttcggcacccagacctacacctgcaacgtagatcacaagcccagcaacaccaaggtggacaagacagttgagcgcaaatgttgtgtcgagtgcccaccgtgcccagcaccacctgtggcaggaccgtcagtcttcctcttccccccaaaacccaaggacaccctcatgatctcccggacccctgaggtcacgtgcgtggtggtggacgtgagccacgaagaccccgaggtccagttcaactggtacgtggacggcatggaggtgcataatgccaagacaaagccacgggaggagcagttcaacagcacgttccgtgtggtcagcgtcctcaccgtcgtgcaccaggactggctgaacggcaaggagtacaagtgcaaggtctccaacaaaggcctnccagcccccatcgagaaaaccatcttccaaaccaaagggcanccccgagaaccacaggtgtacaccctggccccatnccgggaggagatgaccaagaaccaggtcagcctgactggctggcaaaggttntacccaggacatngcctgaatggaaaacaatggcaanccgagaaaac

SEQ ID NO: 2148 - DNA, 721 bp, Homo sapiens
  misc_feature (500)..(500): n equals a,t,g, or c
  misc_feature (600)..(600): n equals a,t,g, or c
  misc_feature (616)..(616): n equals a,t,g, or c
  misc_feature (661)..(661): n equals a,t,g, or c
  misc_feature (667)..(667): n equals a,t,g, or c
  misc_feature (697)..(697): n equals a,t,g, or c
  misc_feature (720)..(721): n equals a,t,g, or c
ggtggagggctccccaatgcacggcgtgtacatgagccagccggcccctgccgctggcccctaccccagcatgcccagcactgcggctgatcccagcatggtgagtgcctacatgtacccagcaggggccactggggcgcaggcggccccccaggcccaggccggacccaccgccagccccgcttactcatcctaccagcctactcccacagcgggctaccagaacgtggcctcccaggccccacagagcctcccggccatctctcagcctccgcagtccagcaccatgggctacatggggagccagtcagtctccatgggctaccagccttacaacatgcagaatctcatgaccaccctcccaagccaggatgcgtctctgccaccccagcagccctacatcgcggggcagcagcccatgtaccagcagatggcaccctctggcggtcccccccagcagcagccccccgtggcccagcaaccgcaggcacaggggccgncggcacagggcaagcgaggcccagctcatttcattcgactgacccaggccatgctcacgtccggagtaacactacatacagttcacctgaaacgcctctntcggcagccacagccnagggtggaggcttcaggtctccagcttctctgcttctcaacttgncatctncagtgccccaaaaatggtacaagcgattantaaaatggaatttcaagaaaaann

SEQ ID NO: 2149 - DNA, 787 bp, Homo sapiens
  misc_feature (631)..(631): n equals a,t,g, or c
  misc_feature (638)..(638): n equals a,t,g, or c
  misc_feature (665)..(665): n equals a,t,g, or c
  misc_feature (668)..(668): n equals a,t,g, or c
  misc_feature (670)..(670): n equals a,t,g, or c
  misc_feature (672)..(672): n equals a,t,g, or c
  misc_feature (680)..(680): n equals a,t,g, or c
  misc_feature (696)..(696): n equals a,t,g, or c
  misc_feature (740)..(740): n equals a,t,g, or c
  misc_feature (744)..(744): n equals a,t,g, or c
  misc_feature (760)..(760): n equals a,t,g, or c
  misc_feature (777)..(777): n equals a,t,g, or c
gaaaacatgattacagggacatctcaggctgactgtgctgtcctgattgttgctgctggtgttggtgaatttgaagctggtatctccaagaatgggcagacccgagagcatgcccttctggcttacacactgggtgtgaaacaactaattgtcggtgttaacaaaatggattccactgagccaccctacagccagaagagatatgaggaaattgttaaggaagtcagcacttacattaagaaaattggctacaaccccgacacagtagcatttgtgccaatttctggttggaatggtgacaacatgctggagccaagtgctaacatgccttggttcaagggatggaaagtcacccgtaaggatggcaatgccagtggaaccacgctgcttgaggctctggactgcatcctaccaccaactcgtccaactgacaagcccttgcgcctgcctctccaggatgtctacaaaattggtggtattggtactggtcctgttgccgagtggagactggtggtctcaaacccggtatggtgggcacctttgcttcagtcaacggtcaacggaagtaaaatctggcgaaatgccccatgaagctttgagtgaagctttttctgggggacaatggggggcnttaatgncaaagaatgggctgttcaaggatggtncgncngnggcaacgnttgctgggggacagcnaaaaattggacccccccatgggaagcaagcttgggtttactggntaangggaataatcctgaancattccagggccaaatnaaccgcccgg

SEQ ID NO: 2150 - DNA, 766 bp, Homo sapiens
  misc_feature (521)..(521): n equals a,t,g, or c
  misc_feature (575)..(575): n equals a,t,g, or c
  misc_feature (648)..(648): n equals a,t,g, or c
  misc_feature (701)..(701): n equals a,t,g, or c
  misc_feature (709)..(709): n equals a,t,g, or c
  misc_feature (736)..(736): n equals a,t,g, or c
  misc_feature (764)..(764): n equals a,t,g, or c
  misc_feature (766)..(766): n equals a,t,g, or c
gatccgccctgtctgcatctgtaggagacagagtcatcatcacttgccaggcgagtcaggacattggcaagtgtttaaattggtatcagcagaaatcagggaaagcccctaaactcctgatctacgatgcatccagtttggaaacaggggtcccatcaacgttcagtgcaagtggatctgggacagattttactctcaccatcagcagcctgcagcctgaagattttgcaacatattactgtcaacagtgtgatcatctcccgtacacttttggccaggggaccaaggtggagatcaaacgaactgtggctgcaccatctgtcttcatcttcccgccatctgatgagcagttgaaatctggaactgcctctgttgtgtgcttgctgaataacttctatcccagagaggccaaagtacagtggaaggtggataacgccctccaatcgggtaactcccaggagagtgtcacagagcaggacagcaaggacagcacctacagcctcagcagcaccctgacgctnagcaaagcagactacgagaaacacaaagtctacgcctgcgaagtcacccatcanggcctgagctcgcccgtcacaaagagcttcaacaggggagagtgttagagggagagtgccccactgttctcanttcagctgacccctccatcttggctctacctttcacagggactaccctatggnctcagtanttactaccctctctctgttatatctantgagaaagatataaggatttcaaaaaanan

SEQ ID NO: 2151 - DNA, 549 bp, Homo sapiens
  misc_feature (3)..(3): n equals a,t,g, or c
  misc_feature (20)..(20): n equals a,t,g, or c
  misc_feature (53)..(53): n equals a,t,g, or c
  misc_feature (63)..(63): n equals a,t,g, or c
  misc_feature (87)..(87): n equals a,t,g, or c
  misc_feature (90)..(90): n equals a,t,g, or c
  misc_feature (146)..(146): n equals a,t,g, or c
  misc_feature (517)..(517): n equals a,t,g, or c
  misc_feature (528)..(528): n equals a,t,g, or c
  misc_feature (535)..(535): n equals a,t,g, or c
  misc_feature (545)..(546): n equals a,t,g, or c
ggntcttaacacatagcccnttatgtgttgctttttactgggaattttcaaanatatggatanaatattctaagacattttgcaaancangaaataccactattcctggatcctaacaataaattagagctctcataagtggtctnctgtggggatgacttcatagtttatcttgactcaaaaggaggacagataactactggcatgaaattgaaggattatcctgctttaaatgaatttcaccttttaagttttactctgtatttgtgtatcctgtagtttcctgggttccctgattgctttgcttggttctttaccatgtttgccttctctgtgctaaataaaaaatgaagttcattttaaagaaatgattaatttggtattttcctttctaggatcaagcgtgctttccttatcgaggagcacaaaatcgttgtgaaagtgttgaaggcacaagcacagagtcagaaagctaaataaaaaaatgaaacttttttgagtaataaaaatgaaaaanaaaataaaaanaaaaaanggggggcccnnttt

SEQ ID NO: 2152 - DNA, 777 bp, Homo sapiens
  misc_feature (593)..(593): n equals a,t,g, or c
  misc_feature (629)..(629): n equals a,t,g, or c
  misc_feature (653)..(653): n equals a,t,g, or c
  misc_feature (666)..(666): n equals a,t,g, or c
  misc_feature (695)..(695): n equals a,t,g, or c
  misc_feature (720)..(720): n equals a,t,g, or c
  misc_feature (732)..(732): n equals a,t,g, or c
  misc_feature (739)..(739): n equals a,t,g, or c
  misc_feature (749)..(749): n equals a,t,g, or c
ggtgccccacgacctggacatgctgctgagggccacctactttgggagcattgtcctgctgagcccagcagtgattgactccccattgaagctggagctgcgggtcctggccccaccgcgctgcaccatcaagccctctggcaccaccatctctgtcactgctagcgtcaccattgccctggtcccaccagaccagcctgaggtccagctgtccagcatgactatggacgcccgtctcagcgccaagatggctctccgggggaaggccctgcgcacgcagctggacctgcgcaggttccgaatctattccaaccattctgcactggagtcgctggctctgatcccattacaggcccctctgaagaccatgctgcagattggggtgatgcccatgctcaatgagcggacctggcgtggggtgcagatcccactacctgagggcatcaactttgtgcatgaggtggtgacgaaccatgcgggattcctcaccatcggggctgatctccactttgccaaagggctgcgagaggtgattgagaagaaccggcctgctgatgtcagggccgtcactgcccccacaccgtccacagcanctgtctgagccctcaatccccaagctggcaagctgncattcaggaccccaacccctcttnagcccctcttttnccacattcataagcctggaatgccccctntaacccccaatggcacaagaagaanacgggaatttgnaagcttnaccccaattnaattccataatcaatctatcaattacag

SEQ ID NO: 2153 - DNA, 750 bp, Homo sapiens
  misc_feature (16)..(16): n equals a,t,g, or c
  misc_feature (53)..(53): n equals a,t,g, or c
  misc_feature (492)..(492): n equals a,t,g, or c
  misc_feature (507)..(507): n equals a,t,g, or c
  misc_feature (648)..(648): n equals a,t,g, or c
  misc_feature (690)..(690): n equals a,t,g, or c
  misc_feature (714)..(714): n equals a,t,g, or c
  misc_feature (719)..(719): n equals a,t,g, or c
  misc_feature (724)..(724): n equals a,t,g, or c
gagaatacataacagntctcttctgtttttaaacacgtttaaggcttagctgnatcatagcaattcttacctgaacattgttttgtgcagtactagaaaacgttaacactggcttttataatttatgatgtttttaagagtttgtcacttatggatatatcaagggaatacttcttgtttgaaaatgtgattcaaaccttgttctgtctgcctctcttcattatgtaatatcttactaattgaagagtagtagcttaaaaggtggcatttacactagaagtcaaaaagagtttatcagacatggctcaccttagaaagatttgctattaggtttgcttcaatgaaaccataaaatctttttcatatttgtcacttaactatgagtcttggaatttaatgtctgttgtttccttttattctaggatcaacttctatacaatccattcttaaaaatgtgcctttcagcaaatggagagcatccaagtttagtgncatgcaacccatcanatccactccaaaaatggatacttagccaaaatgattaagtgttccttaaaattaagttgaaaaaggaaatattctttctcataaaactgtgactaggcatacactgtagtttttgaaaattatgcaaaagcagctaaatgnaacttattccaagtgcatttttcttaattataactttatgancactactacagaaaattctgcaangttcnggttnaaagccaatactagtaatacccaaga

SEQ ID NO: 2154 - DNA, 342 bp, Homo sapiens
  misc_feature (15)..(15): n equals a,t,g, or c
  misc_feature (17)..(17): n equals a,t,g, or c
  misc_feature (32)..(32): n equals a,t,g, or c
  misc_feature (72)..(72): n equals a,t,g, or c
  misc_feature (75)..(75): n equals a,t,g, or c
  misc_feature (77)..(77): n equals a,t,g, or c
  misc_feature (84)..(84): n equals a,t,g, or c
  misc_feature (101)..(101): n equals a,t,g, or c
  misc_feature (179)..(179): n equals a,t,g, or c
  misc_feature (196)..(196): n equals a,t,g, or c
  misc_feature (222)..(222): n equals a,t,g, or c
  misc_feature (247)..(247): n equals a,t,g, or c
  misc_feature (252)..(252): n equals a,t,g, or c
  misc_feature (262)..(262): n equals a,t,g, or c
  misc_feature (288)..(288): n equals a,t,g, or c
  misc_feature (329)..(329): n equals a,t,g, or c
gttcttggattaagntnaaagagtttaagtgnctaacaaacttaaagctactgtagtacctaaaaagtcagngtngnacatagnataaaaactctgcaganaagtattcccaataaggaaatagcattgaaatgttaaatacaatttctgaaagttatggtttttttctatcatctggnataccattgctttattnttataaattattttctcattgccatnggaatagatatctcagattgtgtanatatnctatttaaanaatttatcaggaaatactgcctgtanagttagtatttctatttttatataatgtttgcacactgaantgaagaattgttg

SEQ ID NO: 2155 - DNA, 520 bp, Homo sapiens
  misc_feature (8)..(8): n equals a,t,g, or c
  misc_feature (256)..(256): n equals a,t,g, or c
  misc_feature (267)..(267): n equals a,t,g, or c
  misc_feature (296)..(296): n equals a,t,g, or c
  misc_feature (307)..(307): n equals a,t,g, or c
  misc_feature (325)..(325): n equals a,t,g, or c
  misc_feature (341)..(341): n equals a,t,g, or c
  misc_feature (368)..(368): n equals a,t,g, or c
  misc_feature (411)..(411): n equals a,t,g, or c
  misc_feature (430)..(430): n equals a,t,g, or c
  misc_feature (457)..(457): n equals a,t,g, or c
  misc_feature (508)..(508): n equals a,t,g, or c
  misc_feature (513)..(513): n equals a,t,g, or c
ggcactantatgtaatgacaaaaagctacttattgtagcatcctggaatatctccgtcaactcatattttcatgctgttcatgaaagattcaatgcccctgaatttaaatagcttttttctctgatacagaaaagttgaattttacatggctggagctagaatttgatatgtgaacagttgtgtttgaagcacagtgatcaagttatttttaatttggttttcacattggaaacaagtcagtcattcagatatgantcaaatgtctntaaacccgaactggatgtaagtaaatggnctctcacttgntttatttaacctctaaantctttcattttagggntagcatttggtgtcgaagaggtttaangcttccattgttgactggcaacttctgaaggggtaattatatnggtacccaaaattaagagnggtctatttacggaactcaaatacgtnggccattcaaatgtattacagtggggaaatgaagatactggactaaaccgncttanatattcc

SEQ ID NO: 2156 - DNA, 629 bp, Homo sapiens
  misc_feature (15)..(16): n equals a,t,g, or c
  misc_feature (564)..(565): n equals a,t,g, or c
  misc_feature (591)..(591): n equals a,t,g, or c
  misc_feature (593)..(593): n equals a,t,g, or c
  misc_feature (612)..(612): n equals a,t,g, or c
gctcctgtgcaagannatgaaacatctgtggttcttccttctcctggtggcagctcccagatgggtcctgtcccaggtgcagctgcaggagtcgggcccaggactggtgaagccttcggagaccctgtccctcacctgcactgtctctggtggctccatcagtagttactactggagctggatccggcagcccccagggaagggactggagtggattgggtatatctattacagtgggagcaccaactacaacccctccctcaagagtcgagtcaccatatcagtagacacgtccaagaaccagttctccctgaagctgagctctgtgaccgctgcggacacggccgtgtattactgtgcgagaggtccatatagcagcagctggtacccccgcgctgaatacttccagcactggggccagggcaccctggtcaccgtctcctcagcctccaccaagggcccatcggtcttccccctggcaccctcctccaagagcacctctgggggcacagcggccctgggctgcctggtcaaggactacttccccgaaccggtgacggtgcnnggaactcaggcgccctgaccagcggngngcacacctttcccggctgnctacagtcctcaggact

SEQ ID NO: 2157 - DNA, 591 bp, Homo sapiens
  misc_feature (14)..(14): n equals a,t,g, or c
  misc_feature (30)..(30): n equals a,t,g, or c
  misc_feature (38)..(38): n equals a,t,g, or c
  misc_feature (46)..(46): n equals a,t,g, or c
  misc_feature (60)..(60): n equals a,t,g, or c
  misc_feature (137)..(137): n equals a,t,g, or c
  misc_feature (246)..(246): n equals a,t,g, or c
  misc_feature (320)..(320): n equals a,t,g, or c
  misc_feature (468)..(468): n equals a,t,g, or c
  misc_feature (505)..(505): n equals a,t,g, or c
  misc_feature (514)..(514): n equals a,t,g, or c
  misc_feature (520)..(520): n equals a,t,g, or c
  misc_feature (529)..(529): n equals a,t,g, or c
  misc_feature (555)..(555): n equals a,t,g, or c
atggaatactcctnactatagggaaagctnatgagccngcatggancggcccggaattcncgggtcgacccacgcgtccggtccccgctcagctcctggggctcctgctgctctcgctcccaggttccagatgcganatccagatgacccagtctccttcttccgtgtctgcatctgttggagacagagtcaccatcacttgtcgggcgagtcagggtattaccacatggttagcctggtatcagnagagaccagggaaagcccctacgctcctgatctatgctgcatccagtttgcaaagtggggtcccgtcaaggttnagcggagtggatctgggacagatttcactctcaccattagtcgcctgcagcctgaagactttgcaacttactattgtcaacaggctgacacattccctctcactttcggcggagggaccaaggtggagatcaagcgaactgtggctgnaccatctggcttcatcttcccggcatctgatgagcantttgaaatntggaantggctctgntgggggcctggttgaataactttatnccagagagggcaaaggacaagtggaaggtggaaaaa

SEQ ID NO: 2158 - DNA, 767 bp, Homo sapiens
  misc_feature (9)..(10): n equals a,t,g, or c
  misc_feature (15)..(15): n equals a,t,g, or c
  misc_feature (565)..(565): n equals a,t,g, or c
  misc_feature (567)..(567): n equals a,t,g, or c
  misc_feature (612)..(612): n equals a,t,g, or c
  misc_feature (635)..(635): n equals a,t,g, or c
  misc_feature (644)..(644): n equals a,t,g, or c
  misc_feature (655)..(655): n equals a,t,g, or c
  misc_feature (676)..(676): n equals a,t,g, or c
  misc_feature (687)..(687): n equals a,t,g, or c
  misc_feature (691)..(691): n equals a,t,g, or c
  misc_feature (727)..(727): n equals a,t,g, or c
  misc_feature (764)..(764): n equals a,t,g, or c
ggaagtggnnagtgnaaaatcaggaaaatgtttccaacctggtgattgaggacacagagctgaaacaggtggcttacatatacaagtgtgtcaacacgacattgcaaatcaagggcaaaattaactccattacagtagataactgtaagaaacttggcctggtattcgatgacgtggtgggcattgtggagataatcaacagtaaggatgtcaaagttcaggtaatgggtaaagtgccaaccatatccatcaacaaaacagatggctgccatgcttacctgagcaagaattccctggattgtgaaatagtcagtgccaaatcttccgagatgaatgtcctcattcctacagaaggcggtgactttaatgaattcccagttcctgagcagttcaagaccctatggaacgggcagaagttggtcaccacagtgacagaaattgctggataagcgaagtgccactgggttctttgccctcccttcacaccatgggataaatctgtatcaagacggttctttctagatttcctctacctttttgctcttaaaactgcttctctgctctnanaacacagctacctgccttcctggaaatatacctcaagcttgaaantttggggtgggatagcaggtcanttgatcttntgcaggaaggngccactttttcatatcagctnaaccacgcccnccgnccattcttaaggactggccactaggactgatatccntttaacttttaaccttttggggggtattttacccacnaac

SEQ ID NO: 2159 - DNA, 519 bp, Homo sapiens
  misc_feature (1)..(1): n equals a,t,g, or c
  misc_feature (4)..(4): n equals a,t,g, or c
  misc_feature (23)..(23): n equals a,t,g, or c
  misc_feature (31)..(31): n equals a,t,g, or c
  misc_feature (50)..(50): n equals a,t,g, or c
  misc_feature (211)..(211): n equals a,t,g, or c
  misc_feature (214)..(214): n equals a,t,g, or c
  misc_feature (269)..(269): n equals a,t,g, or c
  misc_feature (274)..(274): n equals a,t,g, or c
  misc_feature (290)..(290): n equals a,t,g, or c
  misc_feature (328)..(328): n equals a,t,g, or c
  misc_feature (335)..(335): n equals a,t,g, or c
  misc_feature (405)..(405): n equals a,t,g, or c
  misc_feature (433)..(433): n equals a,t,g, or c
  misc_feature (444)..(444): n equals a,t,g, or c
  misc_feature (490)..(490): n equals a,t,g, or c
  misc_feature (492)..(492): n equals a,t,g, or c
  misc_feature (515)..(515): n equals a,t,g, or c
nctnactatagggaaagcttaanaatctccntggaacgccccggaattcncgggtcgacccacgcgtccgcttcctcctgtctgaggatggcagcggcaagggggccgccctcatcacggccgtgggcgtgcggttacgcacagaggcaagcagctaagagtccgggatccccagcctactgcctctccagcacttctctcttcaagcggngancccctaccctcccagcgagttgcgctgggagacgctggcgccagggcctgccggngcggngaggaaagcaaaatcnaactaatggtatatattgtagggtacagaatagagcgngtgctgntgataatatctctcacccggatccctcctcacttgccctgccactttgcatggtttgattttgacctggncccccacgtgtgaagtgtagtggcatcnatttctaatgnatgcattcatccaacagagttatttattggctggagatggaaaatnanaccacctgacagggcttctgggncttc

SEQ ID NO: 2160 - DNA, 449 bp, Homo sapiens
  misc_feature (10)..(10): n equals a,t,g, or c
  misc_feature (15)..(15): n equals a,t,g, or c
  misc_feature (444)..(448): n equals a,t,g, or c
ggtcgccgtntggcnagagtgggtccgtcgtccccaacactcgtgctcgctcagacactttggcaggatgtctggggcctcaccagcaggagcgcgtgcaagccgggcaggcggtccacctagacccacagcccctcgggagcaccccacctctttgtgtgatgtagctttctctccctcagcctgcaagggtccgatttgccatcgaaaaagacaacctctacttttttcttttgtattttgataaacactgaagctggagctgttaaatttatcttggggaaacctcagaactggtctatttggtgtcgtggaacctcttactgctttcaatacacgattagtaatcaactgttttgtatacttgttttcagttttcatttcgacaaacaagcactgtaattatagctattagaataaaatctcttaactattaaaaaaaannnnna

SEQ ID NO: 2161 - DNA, 524 bp, Homo sapiens
  misc_feature (1)..(1): n equals a,t,g, or c
  misc_feature (17)..(17): n equals a,t,g, or c
  misc_feature (27)..(28): n equals a,t,g, or c
  misc_feature (30)..(30): n equals a,t,g, or c
  misc_feature (62)..(62): n equals a,t,g, or c
  misc_feature (293)..(293): n equals a,t,g, or c
  misc_feature (301)..(301): n equals a,t,g, or c
  misc_feature (346)..(346): n equals a,t,g, or c
  misc_feature (349)..(349): n equals a,t,g, or c
  misc_feature (353)..(353): n equals a,t,g, or c
  misc_feature (378)..(378): n equals a,t,g, or c
  misc_feature (383)..(383): n equals a,t,g, or c
  misc_feature (468)..(468): n equals a,t,g, or c
  misc_feature (488)..(488): n equals a,t,g, or c
  misc_feature (494)..(494): n equals a,t,g, or c
  misc_feature (500)..(500): n equals a,t,g, or c
  misc_feature (521)..(521): n equals a,t,g, or c
nactgaaacttcctatngtaatacccnntnactatagggaaagcttacgggacttctatggnattcccggaattcctgggtcgacccacgcgtccggcaccccctcctgctgcagaggggcaggccctgcactgtcctgctccacagtgttggcgagaggaggggcccgttgtctccctggccctcaaggcctcccacagtgactcgggctcctgtgcccttattcaggaaaagcctctgtgtcactggctgcctccactcccacttccctgacactgcggggcttggctganagagtggnattggcagcaggtgctgctaccctccctgctgcccctcttgcccnaancccnagtacccgggctcagggaccacagnaaggnacctgcaggttgggccatactggcctcgcctggcctgaggtctcgctgatgctgggctgggtgcgaccccatctgccaggacggngccggcaggtgggcggcagnacaagnaaggangctggcttggggcctatcagnggg

SEQ ID NO: 2162 - DNA, 687 bp, Homo sapiens
  misc_feature (179)..(179): n equals a,t,g, or c
  misc_feature (399)..(399): n equals a,t,g, or c
  misc_feature (543)..(543): n equals a,t,g, or c
  misc_feature (576)..(576): n equals a,t,g, or c
  misc_feature (581)..(582): n equals a,t,g, or c
  misc_feature (600)..(600): n equals a,t,g, or c
  misc_feature (630)..(630): n equals a,t,g, or c
  misc_feature (667)..(667): n equals a,t,g, or c
  misc_feature (676)..(676): n equals a,t,g, or c
  misc_feature (685)..(685): n equals a,t,g, or c
ggccaccatgacggaacaggccatctccttcgccaaagacttcttggccggaggcatcgccgccgccatctccaagacggccgtggctccgatcgagcgggtcaagctgctgctgcaggtccagcacgccagcaagcagatcgccgccgacaagcggtacaagggcatcgtggactgcnttgtccgcatccccaaggagcagggcgtgctgtccttctggaggggcaaccttgccaacgtcattcgctacttccccactcaagccctcaacttcgccttcaaggataagtacaagcagatcttcctggggggcgtggacaagcacacgcagttctggaggtactttgcgggcaacctggcctccggcggtgcggccggcgcgacctccctctgcttcgngtacccgctggattttgccagaacccgcctggcagcggacgtgggaaagtcaggcacagagcgcgagttccgaggcctgggagactgcctggtgaagatcaccaagtccgacggcatccggggcctgtaccagggcttcagtgnctccgtgcagggcatcatcatctaccgggcggnctacnncggcgtgtacgatacggncaagggcatgctcccccgacccaagaacangcacatcgtggtgaagctggatgatcgcgcaaaacgngacggccgnggccggcgngg

SEQ ID NO: 2163 - DNA, 770 bp, Homo sapiens
  misc_feature (17)..(17): n equals a,t,g, or c
  misc_feature (352)..(352): n equals a,t,g, or c
  misc_feature (449)..(449): n equals a,t,g, or c
  misc_feature (565)..(565): n equals a,t,g, or c
  misc_feature (589)..(589): n equals a,t,g, or c
  misc_feature (642)..(642): n equals a,t,g, or c
  misc_feature (654)..(654): n equals a,t,g, or c
  misc_feature (705)..(705): n equals a,t,g, or c
  misc_feature (711)..(711): n equals a,t,g, or c
  misc_feature (717)..(717): n equals a,t,g, or c
  misc_feature (749)..(749): n equals a,t,g, or c
  misc_feature (764)..(764): n equals a,t,g, or c
gccggcgtggtcatggngctggcctggaccgcaatgggaggctccacgctgtttgtggagacatccctgagacggccacaggacaaggatgccaagggtgacaaggatggcagcctggaggtgacaggccagctgggggaggtgatgaaggagagcgcccgcatagcctacaccttcgccagagccttcctcatgcagcacgcccccgccaatgactacctggtgacctcacacatccacctgcatgtgcccgagggcgccacccccaaggacggcccaagcgcaggctgcaccatcgtcacagccctgctgtccctggccatgggcaggcctgtccggcagaatctggccntgactggcgaagtctccctcacgggcaagatcctgcctgttggtggcatcaaggagaagaccattgcggccaagcgcgcaggggtgacgtgcatcgncctgccagccgagaacaagaaggacttctacgacctggcagccttcatcaccgagggcctggaggtgcacttcgtggaacactaccgggagatcttcgacatcgccttcccggacnagcaggcagaggcgcttgccgtgnaacggtgacggcaccccgggactgcagcgcggatgtcaggccttgctggccanaactgaacgctntggggagcgcgcccggactggagtggagcaccgacgagcagttggtccagngaccanatccanggacttaatcggcttaatcgatgtggataaanctattaatgataagncctttg

SEQ ID NO: 2164 - DNA, 772 bp, Homo sapiens
  misc_feature (204)..(204): n equals a,t,g, or c
  misc_feature (332)..(332): n equals a,t,g, or c
  misc_feature (350)..(350): n equals a,t,g, or c
  misc_feature (353)..(353): n equals a,t,g, or c
  misc_feature (359)..(359): n equals a,t,g, or c
  misc_feature (364)..(364): n equals a,t,g, or c
  misc_feature (368)..(368): n equals a,t,g, or c
  misc_feature (426)..(426): n equals a,t,g, or c
  misc_feature (443)..(443): n equals a,t,g, or c
  misc_feature (467)..(467): n equals a,t,g, or c
  misc_feature (476)..(476): n equals a,t,g, or c
  misc_feature (484)..(484): n equals a,t,g, or c
  misc_feature (524)..(524): n equals a,t,g, or c
  misc_feature (548)..(548): n equals a,t,g, or c
  misc_feature (564)..(564): n equals a,t,g, or c
  misc_feature (584)..(584): n equals a,t,g, or c
  misc_feature (588)..(588): n equals a,t,g, or c
  misc_feature (597)..(597): n equals a,t,g, or c
  misc_feature (612)..(612): n equals a,t,g, or c
  misc_feature (626)..(626): n equals a,t,g, or c
  misc_feature (630)..(630): n equals a,t,g, or c
  misc_feature (640)..(640): n equals a,t,g, or c
  misc_feature (643)..(643): n equals a,t,g, or c
  misc_feature (667)..(667): n equals a,t,g, or c
  misc_feature (707)..(707): n equals a,t,g, or c
  misc_feature (739)..(739): n equals a,t,g, or c
  misc_feature (741)..(741): n equals a,t,g, or c
  misc_feature (750)..(750): n equals a,t,g, or c
  misc_feature (771)..(771): n equals a,t,g, or c
gcccagacacaagtcttcactccttcctgcgagccctgaggaagccttctttccccagacatggccaacaagggtccttcctatggcatgagccgcgaagtgcagtccaaaatcgagaagaagtatgacgaggagctggaggagcggctggtggagtggatcatagtgcagtgtggccctgatgtgggccgcccagaccgtggncgcttgggcttccaggtctggctgaagaatggcgtgattctgagcaagctggtgaacagcctgtaccctgatggctccaagcccggtgaaggtgcccgagaacccacccttcatgggtcttcaagcangatggagcaggtgctcanttnctgaangcggntgangactatggggcatcaagactgacatgttccaaactggtgacctcttttgaaggcaaanacatggcaacagtgcanaagaccctgatggctttgggcaanttggcaagngaaccaanaatgatggcactaccgtggagatccaactggttaatgaanaagccagaacataggagggaattncagagagccacttcanagggaaagatgcattgcctnaaanggcagacanaggcctccagccggntgacggtacgaacnactnggagatatanttnagcggaaaggttagcctgaccggncttcccaattcttggtgagcatccgttagctgcttaccanaccgggggacttagcctgcaactttagcttgnantacaaggantgactggagtctcttgcccanc

SEQ ID NO: 2165 - DNA, 513 bp, Homo sapiens
  misc_feature (376)..(376): n equals a,t,g, or c
  misc_feature (403)..(403): n equals a,t,g, or c
  misc_feature (429)..(429): n equals a,t,g, or c
  misc_feature (457)..(457): n equals a,t,g, or c
  misc_feature (470)..(470): n equals a,t,g, or c
  misc_feature (497)..(498): n equals a,t,g, or c
gcccgcagccgtgaggaggacggtctgcatactcgctgcccgccggctccctcccccgcgtccctgcgaccgccgcggcgaagatggcctcaggagtgcaagtaagctgatgaagtatgtcgcattttttatgacatgaaagttcgtaaatgctccacaccagaagaaatcaagaaaagaaagaaggctgtcattttttgtctcagtgcagacaaaaagtgcatcattgtagaagaaggcaaagagatcttggttggagatgttggtgtaaccataactgatcctttcaagcattttgtgggaatgcttctgaaaaagattgtcgctatgctttgtatgatgcaagctttgaaacaaaagaattcagaaaagaaanagttgatgtttttttggggggcaccanaactaggaacttttaaaaagtaaaanggatctatccagcttccaaggatgccanttaaaaaggaaantttcaagggcttaaaaccttgaaaggnnaagccaaatgggccc

SEQ ID NO: 2166 - DNA, 707 bp, Homo sapiens
  misc_feature (303)..(303): n equals a,t,g, or c
  misc_feature (407)..(407): n equals a,t,g, or c
  misc_feature (411)..(411): n equals a,t,g, or c
  misc_feature (416)..(416): n equals a,t,g, or c
  misc_feature (418)..(418): n equals a,t,g, or c
  misc_feature (454)..(454): n equals a,t,g, or c
  misc_feature (481)..(481): n equals a,t,g, or c
  misc_feature (514)..(514): n equals a,t,g, or c
  misc_feature (531)..(531): n equals a,t,g, or c
  misc_feature (541)..(541): n equals a,t,g, or c
  misc_feature (559)..(559): n equals a,t,g, or c
  misc_feature (575)..(575): n equals a,t,g, or c
  misc_feature (581)..(581): n equals a,t,g, or c
  misc_feature (591)..(591): n equals a,t,g, or c
  misc_feature (615)..(615): n equals a,t,g, or c
  misc_feature (641)..(641): n equals a,t,g, or c
  misc_feature (652)..(652): n equals a,t,g, or c
  misc_feature (678)..(678): n equals a,t,g, or c
  misc_feature (699)..(699): n equals a,t,g, or c
gcggctagagaccatgttcctatttttcaaaactctggacacagatctggatggagttgtgacctttgacttgtttaagtggttgcagctgaccatgtttgcatgaggcagggactcgttcccccttgccgtgctcccctccctcctcgtctgccaagcctcgcctcctaccacaccacaccaggccaccccagctgcaagtgccttccttggagcagagaggcagcctcgtcctcctgtcccctctcctcccagccaccatcgttcatctgctccgggcagaactgtgtggcccctgcctgngccagccatgggctcgggatggactccctgggccccacccattgccaagccaggaaggcagctttcgcttggtcctgcctcgggacagcccgggtttccccagnatcngaagngncccctcttcccaatttaagaggccaaccaattcagnaaccaaccggcctgggccttggccggnaagaactattaaactattaacccactaagcttngacacaagtctggcaanttccaaggcnttgtgggaagccccggcnttcccgggtttcgggnaagggncccccggggncttggggaaacggcccgggggccntttcttggggccgaaaacccaaaggncccccttttgnccctttccttgggcccttggttgccnaaccaaggaaatttgcccaancctggggg

SEQ ID NO: 2167 - DNA, 821 bp, Homo sapiens
  misc_feature (13)..(13): n equals a,t,g, or c
  misc_feature (45)..(45): n equals a,t,g, or c
  misc_feature (633)..(633): n equals a,t,g, or c
  misc_feature (687)..(687): n equals a,t,g, or c
  misc_feature (700)..(700): n equals a,t,g, or c
  misc_feature (727)..(727): n equals a,t,g, or c
  misc_feature (732)..(732): n equals a,t,g, or c
  misc_feature (761)..(761): n equals a,t,g, or c
  misc_feature (790)..(790): n equals a,t,g, or c
  misc_feature (796)..(796): n equals a,t,g, or c
ggggaacggaaangggaaaaacttctatttggaatctctggtacncctgccggtaccggtccggaattcccgggtcgacccacgcgtccggaaatagtgatgacgcagtcaccagtcaccctgtctgtgtctccagggggaagcgccaccctctcctgcagggccagtcaaactgttgccggtaacgtagcctggtaccagcagaagcctggccaggctcccaggctcctcgtctatgctgcatcctccagggccactgctatccccgccaggttcagtggcagtgggtcggggactgagttcactctctccatcggcagcctgcagtctgaagatgttgcactttattactgtcagcagtataatacctggcctctcactttcggcggagggaccaaggtggagatcaaacgaactgtggctgcaccatctgtcttcatcttcccgccatctgatgagcagttgaaatctggaactgcctctgttgtgtgcctgctgaataacttctatcccagagaggccaaagtacagtggaaggtggataacgccctccaatcgggtaactcccaggagagtgtcacagagcaggacagcaaggacagcacctacagcctcagcagcaccctgacgctnagcaaagcagactacgagaaacacaaagtctacgcctgcgaagtcacccatcanggcctgagcttgnccgtcacaaagagcttcaacagggganagtgntagagggagaagtgccccaactggttctnaatttcaggcctgaaccccctcccatccntttggncttttgaaccctttttttcacaagg

SEQ ID NO: 2168 - DNA, 811 bp, Homo sapiens
  misc_feature (7)..(7): n equals a,t,g, or c
  misc_feature (20)..(20): n equals a,t,g, or c
  misc_feature (32)..(32): n equals a,t,g, or c
  misc_feature (40)..(40): n equals a,t,g, or c
  misc_feature (638)..(638): n equals a,t,g, or c
  misc_feature (683)..(683): n equals a,t,g, or c
  misc_feature (704)..(704): n equals a,t,g, or c
  misc_feature (717)..(717): n equals a,t,g, or c
  misc_feature (789)..(789): n equals a,t,g, or c
  misc_feature (793)..(793): n equals a,t,g, or c
  misc_feature (796)..(796): n equals a,t,g, or c
  misc_feature (811)..(811): n equals a,t,g, or c
ggaaggnaacggaactatcncgaatgttggtncgcctgcnggtaccggtccggaattcccgggtcgacccacgcgtccggctagagcctgtggggcccggatagtcagccgaccagaggaacggagagaagatgatgttggaacaggagcaggcctgttggaaatcaagaaaattggagatgaatactttactttcatcactgactgcaaagaccccaaggcctgcaccattctcctccggggggctagcaaagagattctctcggaagtagaacgcaacctccaggatgccatgcaagtgtgtcgcaatgttctcctggaccctcagctggtgccagggggtggggcctccgagatggctgtggcccatgccttgacagaaaaatccaaggccatgactggtgtggaacaatggccatacagggctgttgcccaggccctagaggtcattcctcgtaccctgatccagaactgtggggccagcaccatccgtctacttacctcccttcgggccaagcacacccaggagaactgtgagacctggggtgtaaatggtgagacgggtactttggtggacatgaaggaactgggcatatgggagccattggctgtgaagctgcagacttataagacagcantggagacggcagttctgctactgcgaattgatgacatcgtttcangccacaaaaagaaaggcgatnaccaaaagccggnaaggcggggctcctgatgctggccaggaatgaatgctaggcaagggctacttcaatgcaccagaacccgcanaagnctncccctttttcctgan

SEQ ID NO: 2169 - DNA, 821 bp, Homo sapiens
  misc_feature (25)..(25): n equals a,t,g, or c
  misc_feature (32)..(32): n equals a,t,g, or c
  misc_feature (34)..(34): n equals a,t,g, or c
  misc_feature (93)..(93): n equals a,t,g, or c
  misc_feature (673)..(673): n equals a,t,g, or c
  misc_feature (740)..(740): n equals a,t,g, or c
  misc_feature (767)..(767): n equals a,t,g, or c
  misc_feature (771)..(771): n equals a,t,g, or c
  misc_feature (778)..(778): n equals a,t,g, or c
aacgggaaagggaaatactcggaangttggtntngcctgccggtaccggtccggaattcccgggtcgacccacgcgtccgcagagaactcatnaaatgaggaggaaacgtcaagtgaaggcaacatgagggtgcatgctgtggattcttgcatgagcttccagtgtaaaagaggccacatctgtaaggcagaccaacagggaaaacctcactgtgtctgccaggatccagtgacttgtcctccaacaaaaccccttgatcaagtttgtggcactgacaatcagacctatgctagttcctgtcatctattcgctactaaatgcagactggaggggaccaaaaaggggcatcaactccagctggattattttggagcctgcaaatctattcctacttgtacggactttgaagtgattcagtttcctctacggatgagagactggctcaagaatatcctcatgcagctttatgaagccaactctgaacacgctggttatctaaatgagaagcagagaaataaagtcaagaaaatttacctggatgaaaagaggcttttggctggggaccatcccattgatcttctcttaagggactttaagaaaaactaccacatgtatgtgtatcctgtgcactggcaagtttagtgaacttgaccaacaccctatggatagagncttgacacattctgaacttgctcctctgcgagcatctctggtgccatggaacactgcataaccccgnttctttgaggaatggggaccccaacangggntaaagcncattaacccttgaaaggaatggggggcccactgggttttggga

SEQ ID NO: 2170 - DNA, 588 bp, Homo sapiens
  misc_feature (22)..(22): n equals a,t,g, or c
  misc_feature (515)..(515): n equals a,t,g, or c
  misc_feature (535)..(535): n equals a,t,g, or c
  misc_feature (570)..(570): n equals a,t,g, or c
  misc_feature (574)..(574): n equals a,t,g, or c
  misc_feature (582)..(582): n equals a,t,g, or c
gtgggaagactgatcctactcntacttaaattttaagttatgaggtttatgtcaaaagcaacatttcacaaatgtacttttaaggcataataagggttaacattctaggcagtataaacacaccccataatgcaagtaataggtaatctagagatgtggactttattgctatatgggaattacatttaaatttgagggcattttatataaagaaaaatacagacctataaagtttggcatattcattaagttatcttttaatatttttttctagaaaacaggtgacatttgtatctacgataaaaatttttatacagaacctactgcctcaaactgaatcccatcaagaaaactagtttctattgtattagtaactcaaaataaattatcacttcgaaaacttgctttcccacactaaggtaagttcagactagattgaacacttcagaattttttactacagactggttttaagttagaagtgatgcaattttataaataggagaatatacttncactggaggccttactgggnccaaaccaaaatcttaagaaaggcaggagaccccnttcntacttttnaatgaa

SEQ ID NO: 2171 - DNA, 664 bp, Homo sapiens
  misc_feature (317)..(317): n equals a,t,g, or c
  misc_feature (539)..(539): n equals a,t,g, or c
  misc_feature (621)..(621): n equals a,t,g, or c
  misc_feature (643)..(643): n equals a,t,g, or c
  misc_feature (646)..(646): n equals a,t,g, or c
  misc_feature (658)..(658): n equals a,t,g, or c
gcaggcgtccctctgcctgcccactcagtggcaacacccgggagctgttttgtcctttgtggagcctcagcagttccctctttcagaactcactgccaagagccctgaacaggagccaccatgcagtgcttcagcttcattaagaccatgatgatcctcttcaatttgctcatctttctgtgtggtgcagccctgttggcagtgggcatctgggtgtcaatcgatggggcatcctttctgaagatcttcgggccactgtcgtccagtgccatgcagtttgtcaacgtgggctacttcctcatcgcagccggcgttgnggtctttgctcttggtttcctgggctgctatggtgctaagactgagagcaagtgtgccctcgtgacgttcttcttcatcctcctcctcatcttcattgctgaggttgcagctgctgtggtcgcttggtgtacaccacaatggctgagcacttcctgacgttgctggtagtgcctgcatcaagaaagatatggttccaggaagattcattaagtgtggaacancaccatgaaaggctcaaggctgggttcacaatatacggatttgaggactacctattcaaggacaggctttcccatctgtgangcacgacaccagcatgaactgncanaaagattaagcngctagg

SEQ ID NO: 2172 - DNA, 631 bp, Homo sapiens
  misc_feature (399)..(399): n equals a,t,g, or c
  misc_feature (530)..(530): n equals a,t,g, or c
  misc_feature (567)..(567): n equals a,t,g, or c
  misc_feature (614)..(614): n equals a,t,g, or c
ggtcgaaagaggccttcgggtgattgagatggagagggagggcaaaggtcgtatttccacttcaacaggcatctcccctcagatggaagtcacatgtgtgcccacgcccacaagcacagtgtcctccataggtaacacaaatggggaagaagtggggccatctgtctacttggaaaggctaaagatcctccgacagcgatgtggtctggacaacacaaagcaagatgaccgacctcctttgacctctttgctctccaaaccagcagttcctactgtcgcctcttccacagacatgctccacagcaaactctctcagctccgggagtcacgggagcagcaccagcattcagacctggattctaaccagactcactcttcaggaactgtgacctcctcctncttcacagctaacatagacgacttgaaaaaaagactggagagaataaagagcagtcgcaaatgaagctgcccacttccccggacctgcagctttagttactaaactagaatcctatagttaaaaggcctancaggcctagggatccaactggttggatggataagccnggacttggggagagcattgggacaagattggcaacttgtttttttanggctgtgttaaaaaagg

SEQ ID NO: 2173 - DNA, 679 bp, Homo sapiens
  misc_feature (457)..(457): n equals a,t,g, or c
  misc_feature (482)..(482): n equals a,t,g, or c
  misc_feature (545)..(545): n equals a,t,g, or c
  misc_feature (550)..(550): n equals a,t,g, or c
  misc_feature (554)..(554): n equals a,t,g, or c
  misc_feature (569)..(569): n equals a,t,g, or c
  misc_feature (576)..(576): n equals a,t,g, or c
  misc_feature (594)..(594): n equals a,t,g, or c
  misc_feature (618)..(618): n equals a,t,g, or c
  misc_feature (624)..(624): n equals a,t,g, or c
  misc_feature (654)..(654): n equals a,t,g, or c
  misc_feature (677)..(677): n equals a,t,g, or c
ggttaactggtactcaaggttactcattccaggatactttacataaccaaaaacctaggagagcattctacattgtaattttttttttactttgtttacataaaatttacagggttttgtttttttaagcttagtctgttctttgacattgttgattcatgttctaaattttcatcagatttaacatgtttggaggttcttgtgcactcaatgtgaacctactacaagcttctgaactgcaaaacctttttttttaggtcactgtcaacagaaagatgccttatagaatttctcatgattgaaacagaactctgcattctaacctaaaacccctctaaccctttaaatgaagcattatgcctgcgtgaaattttatttttagacatttctgatactaggttttctttacgggggggcatacatattcagtatactgaatttatacagctttcaatgnggcaatatattaaagaagctaggtncctaaattttctcaagttctcaatgggtttccatttaaaaggtttccgaaagactcttaacanttggnaaanacttgatggcagganaacttgnttaaaactaaaggggganaaagagtaactttcaggcaaccantatagnttaatttttaataaccaagcattttaaacngcccttaggctcatttaaggcancc

SEQ ID NO: 2174 - DNA, 294 bp, Homo sapiens
  misc_feature (7)..(7): n equals a,t,g, or c
  misc_feature (19)..(19): n equals a,t,g, or c
  misc_feature (26)..(26): n equals a,t,g, or c
  misc_feature (28)..(28): n equals a,t,g, or c
  misc_feature (36)..(36): n equals a,t,g, or c
  misc_feature (127)..(127): n equals a,t,g, or c
  misc_feature (131)..(131): n equals a,t,g, or c
  misc_feature (254)..(254): n equals a,t,g, or c
  misc_feature (265)..(265): n equals a,t,g, or c
  misc_feature (289)..(289): n equals a,t,g, or c
  misc_feature (293)..(294): n equals a,t,g, or c
cattaangggggtggagcnagccagntngctgatgngcttctcctgcttgaaccagaagagcaatctgtactgcctgaagccgaccatctgctccgaccaggacaactactgcgtgactgtgtctgntagngccggcattgggaatctcgtgacatttggccacagcctggagagcctcagtccctgtagccccctgccctggcacaagctgcatgcacttcaagggcaagcctttgggggttggggtttctgncaattccgggnctaaggccctggcccaaatccagncagnn

SEQ ID NO: 2175 - DNA, 719 bp, Homo sapiens
  misc_feature (62)..(63): n equals a,t,g, or c
  misc_feature (75)..(75): n equals a,t,g, or c
  misc_feature (78)..(78): n equals a,t,g, or c
  misc_feature (80)..(80): n equals a,t,g, or c
  misc_feature (106)..(106): n equals a,t,g, or c
  misc_feature (116)..(116): n equals a,t,g, or c
  misc_feature (178)..(178): n equals a,t,g, or c
  misc_feature (189)..(189): n equals a,t,g, or c
  misc_feature (198)..(198): n equals a,t,g, or c
  misc_feature (261)..(262): n equals a,t,g, or c
  misc_feature (270)..(270): n equals a,t,g, or c
  misc_feature (273)..(273): n equals a,t,g, or c
  misc_feature (298)..(298): n equals a,t,g, or c
  misc_feature (304)..(305): n equals a,t,g, or c
  misc_feature (319)..(319): n equals a,t,g, or c
  misc_feature (329)..(329): n equals a,t,g, or c
  misc_feature (344)..(344): n equals a,t,g, or c
  misc_feature (348)..(348): n equals a,t,g, or c
  misc_feature (354)..(354): n equals a,t,g, or c
  misc_feature (358)..(358): n equals a,t,g, or c
  misc_feature (374)..(374): n equals a,t,g, or c
  misc_feature (386)..(386): n equals a,t,g, or c
  misc_feature (390)..(390): n equals a,t,g, or c
  misc_feature (393)..(393): n equals a,t,g, or c
  misc_feature (408)..(408): n equals a,t,g, or c
  misc_feature (414)..(414): n equals a,t,g, or c
  misc_feature (419)..(419): n equals a,t,g, or c
  misc_feature (427)..(428): n equals a,t,g, or c
  misc_feature (430)..(430): n equals a,t,g, or c
  misc_feature (449)..(449): n equals a,t,g, or c
  misc_feature (453)..(453): n equals a,t,g, or c
  misc_feature (461)..(461): n equals a,t,g, or c
  misc_feature (490)..(490): n equals a,t,g, or c
  misc_feature (492)..(492): n equals a,t,g, or c
  misc_feature (507)..(507): n equals a,t,g, or c
  misc_feature (512)..(512): n equals a,t,g, or c
  misc_feature (515)..(515): n equals a,t,g, or c
  misc_feature (519)..(519): n equals a,t,g, or c
  misc_feature (540)..(540): n equals a,t,g, or c
  misc_feature (545)..(545): n equals a,t,g, or c
  misc_feature (574)..(574): n equals a,t,g, or c
  misc_feature (580)..(580): n equals a,t,g, or c
  misc_feature (593)..(594): n equals a,t,g, or c
  misc_feature (608)..(608): n equals a,t,g, or c
  misc_feature (618)..(618): n equals a,t,g, or c
  misc_feature (623)..(623): n equals a,t,g, or c
  misc_feature (628)..(628): n equals a,t,g, or c
  misc_feature (632)..(632): n equals a,t,g, or c
  misc_feature (641)..(641): n equals a,t,g, or c
  misc_feature (672)..(672): n equals a,t,g, or c
  misc_feature (689)..(689): n equals a,t,g, or c
  misc_feature (711)..(711): n equals a,t,g, or c
atcttgtgacaaaactcacacatgcccaccgtgcccagtacctgaactcctggggggaccgnnagtcttcctctnccncncaaaacccaaggacaccctcatgatntcccggaccnctgaggtcacatgcgtggtggtggacgtgagtcacgaagaccctgaggtcaagttcaactgntacgtggacgncgtggaggngcataatgccaagacaaagccgcgtgaggagcatgtacaacagcactgtaccgtgtgggcaanngtcttaangtnctggaaccaaggacttggcttgaangggtanngggggtaccaaggngccaaggggntttccaaccaaaagngccntttccnaagnccccccaatttggggnaaaaaacccatncttnccnaaagggtctaaaaanggggcnaaggncccccccnntngaaaaccccaccagggttngggnaccaaccnggttggccccctcccaattcccccggggnanggggaagaattgaanccccnttnaaancccaggggtttcaatgccccnggaanccctggcccttggggacccaaaaggggcntttccntaatcccccaagnnggaaaaaattcgtncccaaaaggnaaatngggtnaaanggctaaatnggggccaaaaccgggaagaaaccaaacttgnccaagaacctatggccntcccggggcttggaactttccnaacgggtt

SEQ ID NO: 2176 - DNA, 528 bp, Homo sapiens
  misc_feature (5)..(5): n equals a,t,g, or c
  misc_feature (56)..(56): n equals a,t,g, or c
  misc_feature (92)..(92): n equals a,t,g, or c
  misc_feature (128)..(128): n equals a,t,g, or c
  misc_feature (154)..(154): n equals a,t,g, or c
  misc_feature (194)..(194): n equals a,t,g, or c
  misc_feature (219)..(219): n equals a,t,g, or c
  misc_feature (273)..(273): n equals a,t,g, or c
  misc_feature (318)..(318): n equals a,t,g, or c
  misc_feature (372)..(372): n equals a,t,g, or c
  misc_feature (404)..(404): n equals a,t,g, or c
  misc_feature (418)..(418): n equals a,t,g, or c
  misc_feature (477)..(477): n equals a,t,g, or c
  misc_feature (481)..(481): n equals a,t,g, or c
  misc_feature (510)..(510): n equals a,t,g, or c
  misc_feature (512)..(512): n equals a,t,g, or c
  misc_feature (515)..(515): n equals a,t,g, or c
ggatngagaaagcataaggaagcctgcacatggatttttccagactctgcctgtgnctttcccgtcatctcgctgtgtatccttaccactgngatccaaccacatactgatttgtgtgagctctaggnttctctgaacatgaaagcaatcttgntaacctttgacacaaagtgatatatttgctgaaaattttncattagggtagaacaaatctactgngaatcattggtctgtattcagcagacattattgagtaactaatatgtactatgngtacatgcacatagttataaggatgtaaaacaatacagttggtgnacttaaggagatcattgctggaaggggcagatcataatgccatatgttatgtangcagagtcaagatactatgggagaaaaattangacatacagcttanggatttcagtgacaggtttatagggggagggatcatttgaaccgatttctgaatggtancagngatcagcagtgaaaataggttggattcananggngaaaagcctgaac

SEQ ID NO: 2177 - DNA, 755 bp, Homo sapiens
  misc_feature (15)..(15): n equals a,t,g, or c
  misc_feature (33)..(33): n equals a,t,g, or c
  misc_feature (46)..(46): n equals a,t,g, or c
  misc_feature (48)..(48): n equals a,t,g, or c
  misc_feature (53)..(53): n equals a,t,g, or c
  misc_feature (108)..(109): n equals a,t,g, or c
  misc_feature (370)..(370): n equals a,t,g, or c
  misc_feature (375)..(375): n equals a,t,g, or c
  misc_feature (532)..(532): n equals a,t,g, or c
  misc_feature (662)..(662): n equals a,t,g, or c
  misc_feature (695)..(695): n equals a,t,g, or c
  misc_feature (699)..(699): n equals a,t,g, or c
  misc_feature (746)..(746): n equals a,t,g, or c
aaagtctttctaagngaaactcctttgggaaanctctcactatagntnaaagntggtacgcctgcaggtaccggtccggaattcccgggtcgacccatgcgtccggcnnggttatgtattaagctctattgaaggccgagtggcagttgagtatttggacccaagccctgaggtacagaagaagaagtatgccttcaaatgtcacagactaaaagaaaataatattgagcagatttacccagtcaatgccatttcttttcacaatatccacaatacatttgccacaggtggttctgatggctttgtaaatatttgggatccatttaacaaaaagcgactgtgccaattccatcggtaccccacgagcatngcatnacttgccttcagtaatgatgggactacgcttgcaatagcgtcatcatatatgtatgaaatggatgacacagaacatcctgaagatggtatcttcattcgccaagtgacagatgcagaaacaaaacccaagtccacctaatcatcctgtgaaagtggnttctctatggaaagctttggttgcttcctacaaatacatgcttattccttaagggatgtgttagagttactggggatttctctggtttctgcttacaagaaacttgctatgaccttaatactttggttangatgaggaggctttgggtccctgtacagtagtntgangaattccctttggccctagtaagccagttgtggatttaacagttganttttttgaa

SEQ ID NO: 2178 - DNA, 632 bp, Homo sapiens
  misc_feature (7)..(7): n equals a,t,g, or c
  misc_feature (12)..(12): n equals a,t,g, or c
  misc_feature (19)..(19): n equals a,t,g, or c
  misc_feature (42)..(42): n equals a,t,g, or c
  misc_feature (83)..(83): n equals a,t,g, or c
  misc_feature (109)..(110): n equals a,t,g, or c
  misc_feature (388)..(388): n equals a,t,g, or c
  misc_feature (425)..(425): n equals a,t,g, or c
  misc_feature (439)..(439): n equals a,t,g, or c
  misc_feature (452)..(452): n equals a,t,g, or c
  misc_feature (459)..(459): n equals a,t,g, or c
  misc_feature (464)..(464): n equals a,t,g, or c
  misc_feature (466)..(466): n equals a,t,g, or c
  misc_feature (476)..(476): n equals a,t,g, or c
  misc_feature (484)..(485): n equals a,t,g, or c
  misc_feature (489)..(489): n equals a,t,g, or c
  misc_feature (493)..(493): n equals a,t,g, or c
  misc_feature (507)..(508): n equals a,t,g, or c
  misc_feature (513)..(513): n equals a,t,g, or c
  misc_feature (515)..(515): n equals a,t,g, or c
  misc_feature (525)..(525): n equals a,t,g, or c
  misc_feature (532)..(532): n equals a,t,g, or c
  misc_feature (536)..(537): n equals a,t,g, or c
  misc_feature (540)..(540): n equals a,t,g, or c
  misc_feature (544)..(544): n equals a,t,g, or c
  misc_feature (552)..(553): n equals a,t,g, or c
  misc_feature (555)..(555): n equals a,t,g, or c
  misc_feature (558)..(558): n equals a,t,g, or c
  misc_feature (575)..(575): n equals a,t,g, or c
  misc_feature (582)..(582): n equals a,t,g, or c
  misc_feature (587)..(588): n equals a,t,g, or c
  misc_feature (595)..(595): n equals a,t,g, or c
  misc_feature (616)..(616): n equals a,t,g, or c
  misc_feature (622)..(622): n equals a,t,g, or c
  misc_feature (632)..(632): n equals a,t,g, or c
aggtacncgagngaaggancctgcaggtaccgggccggaatnccgggtcgacccacgcgtcgcgtttacatgtggtggcagcngcacagtgtcagagccacttctggcnntttccctcccctttttagtgcccatagtttttggatcctcccttgagttttaccagcacaagccattctttgcccctgttcacataactgagctcaagctcttgccaaacaccaacaagcaagatggttgcaacctgggcaacattgaatccaccacccttgggctccctctgggaagccccagcaccggggggcttttgggcacagggtcagtggtcagccatcttgagacactggacatttgggctttgtcgtacaatttccagcacccgccttgnagttgactgtggcagttttcaaccagcattttgagcngagtggaggtgcantgaccagggattngccagancagcnangccagtgacngaacattnngcanccantgcaaaagctgttnnggaangnccagctgggnggatctnaagnnacnggangaaagtgnncntcncaaaggaatttttcccnccaaagnccccnngaatctnattgggcatgggccgggcacnggctgnagttaagctn

SEQ ID NO: 2179 - DNA, 354 bp, Homo sapiens
  misc_feature (141)..(141): n equals a,t,g, or c
  misc_feature (148)..(148): n equals a,t,g, or c
  misc_feature (329)..(329): n equals a,t,g, or c
  misc_feature (333)..(333): n equals a,t,g, or c
  misc_feature (338)..(338): n equals a,t,g, or c
  misc_feature (340)..(340): n equals a,t,g, or c
  misc_feature (349)..(349): n equals a,t,g, or c
atctggttaggctggtgttagggttctttgtttttggggtttggcagagatgtgtttaagtgctgtggccagaagcggggggagggggggtttggtggaaattttttgttatgatgtctgtgtggaaagcggctgtgcggngattcanttgttattattatgtcctacaagcattaattaattaacacactttagtaagtatgttcgcctgtaatattgaacgtaggtgcgataaataataggatgaggcaggaatcaaagacagatactgcgacatagggtgctccggctccagcgtctcgcaatgctataaaaaaaaaaaaaaaaangggnggccncnctaaagganccaag

SEQ ID NO: 2180 - DNA, 684 bp, Homo sapiens
  misc_feature (508)..(508): n equals a,t,g, or c
  misc_feature (638)..(638): n equals a,t,g, or c
  misc_feature (644)..(644): n equals a,t,g, or c
  misc_feature (648)..(648): n equals a,t,g, or c
  misc_feature (666)..(666): n equals a,t,g, or c
  misc_feature (668)..(668): n equals a,t,g, or c
gcttgatgcctcctgcttttatagcagtttatggggagcacttgaaagagcgtgtgtacatgtattttttcaggatttttgaagctgttgaccttttcatgttgattattttaaattgtgtgaaatagtataaaaatcattggtgttcattatttgctttgcctgagctcagatcaaaatgtttgaagaaaggaactttatttttgcaagttacgtacagtttttatgcttgagatatttcaacatgttatgtatattggaacttctacagcttgatgcctcctgcttttatagcagtttatggggagcacttgaaagagcgtgtgtacatgtattttttttctaggcaaacattgaatgcaaacgtgtatttttttaatataaatatataactgtccttttcatcccatgttgccgctaagtgatatttcatatgtgtggttatactcataataatgggccttgtaagtcttttcaccattcatgaataataataaatatgtactgntggcatgtaatgcttagttttcttggatttacttcttttttaaatgtaaggaccaaacttctaaactaattggtcttttggtgctttaatttttaaaaaattacattcttctgatgtaacatgtggattncatacnaaangaatatagtttaaatatngnatttggaaataaaacc

SEQ ID NO: 2181 - DNA, 443 bp, Homo sapiens
  misc_feature (154)..(154): n equals a,t,g, or c
  misc_feature (201)..(201): n equals a,t,g, or c
  misc_feature (270)..(270): n equals a,t,g, or c
  misc_feature (275)..(275): n equals a,t,g, or c
  misc_feature (277)..(277): n equals a,t,g, or c
  misc_feature (297)..(297): n equals a,t,g, or c
  misc_feature (305)..(305): n equals a,t,g, or c
  misc_feature (322)..(322): n equals a,t,g, or c
  misc_feature (328)..(328): n equals a,t,g, or c
  misc_feature (331)..(331): n equals a,t,g, or c
  misc_feature (373)..(373): n equals a,t,g, or c
  misc_feature (412)..(412): n equals a,t,g, or c
  misc_feature (417)..(417): n equals a,t,g, or c
  misc_feature (434)..(434): n equals a,t,g, or c
  misc_feature (437)..(437): n equals a,t,g, or c
caaagcgccaagatatcaagtcagatggcttcagcatcgagacatgcaaaattatggttgacatgctaaattcggacgggagtggcaagctggggctgaaggagttctacattctctggacgaagattcaaaaataccaagtaagatcccaganatgcgggtggatctgtgttgggaaacattctgttcatatgctttaanatgcagcaactcctgcacagagtgggagaaacatttccaaggggattgggattttacccataatgaaanctcanantgagtaaagatggggctgangaaatgcnaacaaaaaaccaaccangactcncangtgaaatgggcctattcccttcctccctgaattattgggatnctcttaaaggccaccatcaagggtttccctgaaaaaggnttttngaaagcttaaagttccntantttttt

SEQ ID NO: 2182 - DNA, 374 bp, Homo sapiens
  misc_feature (11)..(11): n equals a,t,g, or c
  misc_feature (18)..(18): n equals a,t,g, or c
  misc_feature (155)..(155): n equals a,t,g, or c
  misc_feature (219)..(220): n equals a,t,g, or c
  misc_feature (262)..(262): n equals a,t,g, or c
  misc_feature (267)..(267): n equals a,t,g, or c
  misc_feature (270)..(271): n equals a,t,g, or c
  misc_feature (282)..(282): n equals a,t,g, or c
  misc_feature (290)..(290): n equals a,t,g, or c
  misc_feature (312)..(312): n equals a,t,g, or c
  misc_feature (321)..(321): n equals a,t,g, or c
  misc_feature (372)..(372): n equals a,t,g, or c
ggctcagaacnaaagatnagcaaaaaaagtcttcagggtaggactgccaacatataggactttgtaatgccatcttctttatatttctgggacattaaaattcaaatctctgttgaaaatgaaaaatgtaaaacttagttgcaaacagtataganaataagtgatgatgaaatatttgttttcatacaaacatgctttcccattctaaatagatgctanntttcttttttccttggctgtaaataaaagtgccccaaatganaaacnaannaaaagggcggncgctctanaggatccaagcttacgtacgcngtgcatgcnacgtcatagctcttctataggtgtccacctaaattcaattcactgggccgntc

SEQ ID NO: 2183 - DNA, 766 bp, Homo sapiens
  misc_feature (625)..(625): n equals a,t,g, or c
  misc_feature (677)..(677): n equals a,t,g, or c
  misc_feature (693)..(693): n equals a,t,g, or c
  misc_feature (732)..(732): n equals a,t,g, or c
  misc_feature (757)..(757): n equals a,t,g, or c
  misc_feature (760)..(760): n equals a,t,g, or c
aagcttacgtacgcgtgcatgcgacgtcatagctcttctatagtgtcacctaaattcaattcactggccgtcgttttacaacgtcgtgactgggaaaaccctggcgttacccaacttaatcgccttgcagcacatccccctttcgccagctggcgtaatagcgaagaggcccgcaccgatcgcccttcccaacagttgcgcagcctgaatggcgaatgggacgcgccctgtagcggcgcattaagcgcggcgggtgtggtggttacgcgcagcgtgaccgctacacttgccagcgccctagcgcccgctcctttcgctttcttcccttcctttctcgccacgttcgccggctttccccgtcaagctctaaatcgggggctccctttagggttccgatttagtgctttacggcacctcgaccccaaaaaacttgattagggtgatggttcacgtagtgggccatcgccctgatagacggtttttcgccctttgacgttggagtccacgttcttaatagtggactcttgttccaaactggaacaacactcaaccctatctcggtctattcttttgatttataagggattttgccgatttcggcctattgggtaaaaaatgagctganttaacaaaaatttaacgcgaatttacaaaatattacgcttacaattaagtgnacttttcggggaaagngccggaaccctattggtaattttctaaaacattcaatangatccgtcatgagacataacccganaanggttca

SEQ ID NO: 2184 - DNA, 259 bp, Homo sapiens
  misc_feature (251)..(251): n equals a,t,g, or c
  misc_feature (255)..(257): n equals a,t,g, or c
  misc_feature (259)..(259): n equals a,t,g, or c
gtaaaaacttacactcttatacaagagtgtatttccccttaattaggatgcatgttgattaaactcgagatacagctttttgcagtatggtgggttggttttggtgtaacatcttcaacatgtcacactggctatcaaagaataagaaaattattgagtatgagtgtgttttataaactttctgagtttttcagatgtcttaatattttttaatagaacttaataaaatgtctagattgactattaaaaanacannncn

SEQ ID NO: 2185 - DNA, 596 bp, Homo sapiens
  misc_feature (5)..(5): n equals a,t,g, or c
  misc_feature (11)..(11): n equals a,t,g, or c
  misc_feature (13)..(13): n equals a,t,g, or c
  misc_feature (65)..(65): n equals a,t,g, or c
  misc_feature (78)..(78): n equals a,t,g, or c
  misc_feature (103)..(103): n equals a,t,g, or c
  misc_feature (376)..(377): n equals a,t,g, or c
  misc_feature (380)..(381): n equals a,t,g, or c
  misc_feature (384)..(384): n equals a,t,g, or c
  misc_feature (391)..(391): n equals a,t,g, or c
  misc_feature (397)..(397): n equals a,t,g, or c
  misc_feature (400)..(401): n equals a,t,g, or c
  misc_feature (420)..(420): n equals a,t,g, or c
  misc_feature (424)..(424): n equals a,t,g, or c
  misc_feature (453)..(453): n equals a,t,g, or c
  misc_feature (462)..(462): n equals a,t,g, or c
  misc_feature (465)..(465): n equals a,t,g, or c
  misc_feature (481)..(481): n equals a,t,g, or c
  misc_feature (567)..(567): n equals a,t,g, or c
  misc_feature (572)..(572): n equals a,t,g, or c
  misc_feature (583)..(583): n equals a,t,g, or c
  misc_feature (593)..(594): n equals a,t,g, or c
gggantttggncncctgccggtaccggtccggaattcccgggtcgacccacgcgtccgggggagntttcatcaacctnaggctgtctgaaacctgggtcaganattatcaggttttgccagatcgaagccatcctaaactgctgatgagtggaggtgggggttatcttctctccggcttcaccgttgccatggacaaccttaaagcagacaccagcctcaaatctaatgcaagcactttagaatcacacgagactgaggagcctgcagctaaaaaacgaaaatgcccagagtctgactcttaacccttttgagaattgctctgaattttgttctcaggcattatacagttagtaattaaactttaaatgccaaaannaannaanaacaaanaaacantgnnaaaaaaaaaaaaagggcgnccgntctagaggatccaagcttacgtacgcggngcatgcgangtnatagctcttctatagnggcacctaaattcaattactgcccgtcggtttacaaacgcaggactgggaaaaccctggcggtacccaacttaatcgccttgcagnacatnccccttttcgnccagctggcnnaa

SEQ ID NO: 2186 - protein, 57 aa, Homo sapiens
  MISC_FEATURE (5): Xaa equals any of the twenty naturally occurring L-amino acids
HFLFXTKNTKISQAWWHMPVIPATRQAEAQELPERRCKRLQSAEIVPLHSSQGQTAK

SEQ ID NO: 2187 - protein, 35 aa, Homo sapiens
HEGRGGYGGRGYGDPYGGGGGGGGGGGGGGGYRRY

SEQ ID NO: 2188 - protein, 310 aa, Homo sapiens
GPHGNGEVRWPLPPPPPRFVARRKMADLEEQLSDEEKVRIAAKFIIHAPPGEFNEVFNDVRLLLNNDNLLREGAAHAFAQYNLDQFTPVKIEGYEDQVLITEHGDLGNGKFLDPKNRICFKFDHLRKEATDPRPCEVENAVESWRTSVETALRAYVKEHYPNGVCTVYGKKIDGQQTIIACIESHQFQAKNFWNGRWRSEWKFTITPSTTQVVGILKIQVHYYEDGNVQLVSHKDIQDSLTVSNEVQTAKEFIKIVEAAENEYQTAISENYQTMSDTTFKALRRQLPVTRTKIDWNKILSYKIGKEMQNA

SEQ ID NO: 2189 - protein, 91 aa, Homo sapiens
ALGHCTRPWADIYLLWGTFLCVVGCLAMSLAGQVQRLTPVIPALWEAEVGRSLEAGSSEETSQHGETLSLLKIQKLAGCGDTHENHLNSGG

SEQ ID NO: 2190 - protein, 389 aa, Homo sapiens
  MISC_FEATURE (376): Xaa equals any of the twenty naturally occurring L-amino acids
  MISC_FEATURE (377): Xaa equals any of the twenty naturally occurring L-amino acids
  MISC_FEATURE (379): Xaa equals any of the twenty naturally occurring L-amino acids
VWSFSLDTEPSRQAKQARTHHPAPGPASLLPSNAMGSNLSPQLCLMPFILGLLSGGVTTTPWSLARPQGSCSLEGVEIKGGSFRLLQEGQALEYVCPSGFYPYPVQTRTCRSTGSWSTLKTQDQKTVRKAECRAIHCPRPHDFENGEYWPRSPYYNVSDEISFHCYDGYTLRGSANRTCQVNGRWSGQTAICDNGAGYCSNPGIPIGTRKVGSQYRLEDSVTYHCSRGLTLRGSQRRTCQEGGSWSGTEPSCQDSFMYDTPQEVAEAFLSSLTETIEGVDAEDGHGPGEQQKRKIVLDPSGSMNIYLVLDGSDSIGASNFTGAKKCLVNLIEKVASYGVKPRYGLVTYATYPKIWVKVSEADSSNAGLGHGSSFNXXQXLKTTSLKSGA

SEQ ID NO: 2191 - protein, 51 aa, Homo sapiens
FAEDNGLKIHLCSYKRDDLVLFYDCTSFVLTFGPSPWFLTQGFLNPLEFSA

SEQ ID NO: 2192 - protein, 171 aa, Homo sapiens
  MISC_FEATURE (72): Xaa equals any of the twenty naturally occurring L-amino acids
  MISC_FEATURE (132): Xaa equals any of the twenty naturally occurring L-amino acids
LILVLMFVVWMKRRDKERQAKQLLIDPEDDVRDNILKYDEEGGGEEDQDYDLSQLQQPDTVEPDAIKPVGIXRMDERPIHAEPQYPVRSAAPHPGDIGDFINEGLKAADNDPTAPPYDSLLVFDYEGSGSTXGSLSSLNSSSSGGEQDYDYLNDWGPRFKKLADMYGGGDD

SEQ ID NO: 2193 - protein, 132 aa, Homo sapiens
RKHLAGQIFACLFNIYEYIHMFIQIISILMFVFTKLQQYGMFNHLSHVFALQFPQVSDTTYVSGFSEKAYNISEDICKFFKKLAGHSWLMPVIPTLWEAETGGSPEARNLRPAQTTWRNLISIKNTKISRMW

SEQ ID NO: 2194 - protein, 83 aa, Homo sapiens
  MISC_FEATURE (19): Xaa equals any of the twenty naturally occurring L-amino acids
  MISC_FEATURE (28): Xaa equals any of the twenty naturally occurring L-amino acids
  MISC_FEATURE (64): Xaa equals any of the twenty naturally occurring L-amino acids
  MISC_FEATURE (77): Xaa equals any of the twenty naturally occurring L-amino acids
  MISC_FEATURE (79): Xaa equals any of the twenty naturally occurring L-amino acids
DSHRPRAMRALWVLGLSCXLLTFGSVRXDDEVDVDGTVEEDLGKSREGSRTDDEVVQREEEAIXVGWIKCIPNKRTXEXKSRK

SEQ ID NO: 2195 - protein, 95 aa, Homo sapiens
GNSETRAGAGPPYAERWSSGPTVLSLYFVSVSYFFSQSLITPDEKYPQVWRGWPPSKTILSKKNKTGGIMLPDFKGYYKATVTKTAWYWYQKQRD

SEQ ID NO: 2196 - protein, 240 aa, Homo sapiens
  MISC_FEATURE (234): Xaa equals any of the twenty naturally occurring L-amino acids
GWLPCGSSVVPATPGSPPSRFWLLPAMALRVLLLTALTLCHGFNLDTENAMTFQENARGFGQSVVQLQGSRVVVGAPQEIVAANQRGSLYQCDYSTGSCEPIHLQVPVEAVNMSLGLSLAATTSPPQLLACGPTVHQTCSENTYVKGLCFLFGSNLRQQPQKFPEALRGCPQEDSDIAFLIDGSGSIIPHDFRRMKEFVSTVMEQLKKSKTLFSLMQYSEEFRIHFTSKSSRTXLTQDHW

SEQ ID NO: 2197 - protein, 171 aa, Homo sapiens
ADEATRRVVSEIPVLKTNAGPRDRELWVQRLKEEYQSLIRYVENNKNADNDWFRLESNKEGTRWFGKCWYIHDLLKYEFDIEFDIPITYPTTAPEIAVPELDGKTAKMYRGGKICLTDHFKPLWARNVPKFGLAHLMALGLGPWLAVEIPDLIQKASSNTKRNATNEESSH

SEQ ID NO: 2198 - protein, 93 aa, Homo sapiens
  MISC_FEATURE (6): Xaa equals any of the twenty naturally occurring L-amino acids
FSSLYXVIVEKAPKARIGDLDKKKYLVPSDLTVGQFYFLIRKRIHLRAEDALFFFVNNVIPPTSATMGQLYQEHHEEDFFLYIAYSDESVYGL

SEQ ID NO: 2199 - protein, 171 aa, Homo sapiens
  MISC_FEATURE (152): Xaa equals any of the twenty naturally occurring L-amino acids
IRHEPPCPRTASAGGAPGDSAVGACADTHPSPLVSPPAMAAATASPRSLLVLLQVVVLALAQIRGPPGERGPPGPPGPPGVPGSDGIDGDNGPPGKAGPPGPKGEPGKAGPDGPDGKPGIDGLTGAKGEPGPMGIPGVKGQPGLLVLLAFRXLVFLELWGSWNCCLPGKLN

SEQ ID NO: 2200 - protein, 70 aa, Homo sapiens
  MISC_FEATURE (1): Xaa equals any of the twenty naturally occurring L-amino acids
  MISC_FEATURE (2): Xaa equals any of the twenty naturally occurring L-amino acids
  MISC_FEATURE (3): Xaa equals any of the twenty naturally occurring L-amino acids
  MISC_FEATURE (4): Xaa equals any of the twenty naturally occurring L-amino acids
XXXXTLTKGNKSWSSTAVAAALELVDPPGCRNSAREKNYLYITLKGVEGLFAELLRLKYTLFLEKITDFL

SEQ ID NO: 2201 - protein, 63 aa, Homo sapiens
QESTLHLVLRLRGGAKKRKKKSYTTPKKNKHKRKKVKLAVLKYYKVSQLKGRMSAKSWLIWKT

SEQ ID NO: 2202 - protein, 240 aa, Homo sapiens
  MISC_FEATURE (18): Xaa equals any of the twenty naturally occurring L-amino acids
  MISC_FEATURE (194): Xaa equals any of the twenty naturally occurring L-amino acids
  MISC_FEATURE (210): Xaa equals any of the twenty naturally occurring L-amino acids
  MISC_FEATURE (213): Xaa equals any of the twenty naturally occurring L-amino acids
ATPAGRLPLAVTVPLSWXAPGVPRHLPGLREPLHGAHPRGWDVSGPLRELRPRLCHLRKGPQGYGFNLHSDKSRPGQYIRSVDPGSPAARSGLRAQDRLIEVNGQNVEGLRHAEVVASIKAREDEARLLVVDPETDEHFKRLRVTPTEEHVEGPLPSPVTNGTSPAQLNGGSACSSRSDLPGSDKDTEDGSAWXARSLPGERPPPEPHGXRGXGEGSSHAVNKRAPQMDWNRKREIFSNF

SEQ ID NO: 2203 - protein, 35 aa, Homo sapiens
  MISC_FEATURE (29): Xaa equals any of the twenty naturally occurring L-amino acids
LISNFNKVSGYKINVQKSLAFLYTNNRQXERKLMN

SEQ ID NO: 2204 - protein, 93 aa, Homo sapiens
  MISC_FEATURE (78): Xaa equals any of the twenty naturally occurring L-amino acids
  MISC_FEATURE (86): Xaa equals any of the twenty naturally occurring L-amino acids
  MISC_FEATURE (93): Xaa equals any of the twenty naturally occurring L-amino acids
SAVMGRKKKKQLKPWCWYCNRDFDDEKILIQHQKAKHFKCHICHKKLYTGPGLAIHCMQVHKETIDAVPNAYLGEQTXIGNIWYGXYSRKRYX

SEQ ID NO: 2205 - protein, 22 aa, Homo sapiens
FHFHSITLLILGLLTNTLTIYQ

SEQ ID NO: 2206 - protein, 74 aa, Homo sapiens
  MISC_FEATURE (2): Xaa equals any of the twenty naturally occurring L-amino acids
WXYRILNRIQFDMTAKNVGLTSTNAEVRGFIDQNLSPTKGNISFVAFPVSNTNSPTKILPKTLGPINVNVGPQM

SEQ ID NO: 2207 - protein, 122 aa, Homo sapiens
  MISC_FEATURE (50): Xaa equals any of the twenty naturally occurring L-amino acids
  MISC_FEATURE (75): Xaa equals any of the twenty naturally occurring L-amino acids
  MISC_FEATURE (80): Xaa equals any of the twenty naturally occurring L-amino acids
  MISC_FEATURE (85): Xaa equals any of the twenty naturally occurring L-amino acids
  MISC_FEATURE (98): Xaa equals any of the twenty naturally occurring L-amino acids
  MISC_FEATURE (105): Xaa equals any of the twenty naturally occurring L-amino acids
  MISC_FEATURE (111): Xaa equals any of the twenty naturally occurring L-amino acids
  MISC_FEATURE (116): Xaa equals any of the twenty naturally occurring L-amino acids
YSTDNNNNWYSIFYLHSSFLGENAEKLLQFKRWFWSIVEKMSMTERQDLXYFWTSSPSLPASEEGFQPMPSITIXPPDDXHLPTXKYLHFLDFTFPLXSFKQDSXNRKLVXSPFRXQKFWVL

SEQ ID NO: 2208 - protein, 288 aa, Homo sapiens
  MISC_FEATURE (10): Xaa equals any of the twenty naturally occurring L-amino acids
  MISC_FEATURE (15): Xaa equals any of the twenty naturally occurring L-amino acids
  MISC_FEATURE (268): Xaa equals any of the twenty naturally occurring L-amino acids
  MISC_FEATURE (271): Xaa equals any of the twenty naturally occurring L-amino acids
  MISC_FEATURE (273): Xaa equals any of the twenty naturally occurring L-amino acids
  MISC_FEATURE (274): Xaa equals any of the twenty naturally occurring L-amino acids
  MISC_FEATURE (276): Xaa equals any of the twenty naturally occurring L-amino acids
  MISC_FEATURE (286): Xaa equals any of the twenty naturally occurring L-amino acids
FSSSACPSVXSLFVXLGKNPHDAQGHPRASEDQPSSGKPVTSYPGECGFVFTKEASLEIRDMLLANKVPAAARAGAIAPCEVTVPAQNTGLGPEKTSFFQALGITTKISRGTIEILSDVQLIKTGDKVGASEATLLNMLNISPFSFGLIIQQVFDNGSIYNPEVLDITEETLHSRFLEGVRNVASVCLQIGYPTVASVPHSIINGYKRVLALSVETDYTFPLAEKVKAFLADPSAFVAAAPVAAATTAAPAAAAAPAKVEAKEESEEXDEXIXXSXISKSNNSSQXIV

SEQ ID NO: 2209 - protein, 65 aa, Homo sapiens
KYKKNSWAWWHAPVIPAIQEAEAENFLNPGGRGCSEPRSCHCTPAWVTEQDSVSKKKKKKKKKTR

SEQ ID NO: 2210 - protein, 641 aa, Homo sapiens
PRVRDVLCPVYDLDNNVAFIGMYQTMTKKAAITVQRKDFPSNSFYVVVVVKTEDQACGGSLPFYPFAEDEPVDQGHRQKTLSVLVSQAVTSEAYVSGMLFCLGIFLSFYLLTVLLACWENWRQKKKTLLVAIDRACPESGHPRVLADSFPGSSPYEGYNYGSFENVSGSTDGLVDSAGTGDLSYGYQGRSFEPVGTRPRVDSMSSVEEDDYDTLTDIDSDKNVIRTKQYLYVADLARKDKRVLRKKYQIYFWNIATIAVFYALPVVQLVITYQTVVNVTGNQDICYYNFLCAHPLGNLSLPCVAPSSAFNNILSNLGYILLGLLFLLIILQREINHNRALLRNDLCALECGIPKHFGLFYAMGTALMMEGLLSACYHVCPNYTNFQFDTSFMYMIAGLCMLKLYQKRHPDINASAYSAYACLAIVIFFSVLGVVFGKGNTAFWIVFSIIHIIATLLLSTQLYYMGRWKLDSGIFRRILHVLYTDCIRQCSGPLYVDRMVLLVMGNVINWSLAAYGLIMRPNDFASYLLAIGICNLLLYFAFYIIMKLRSGERIKLIPLLCIVCTSVVWGFALFFFFQGLSTWQKTPAESREHNRDCILLDFFDDHDIWHFLSSIAMFGSFLVLLTLDDDLDTVQRDKIYVF

SEQ ID NO: 2211 - protein, 152 aa, Homo sapiens
FGTSFCWCYFQFYFQCHNRVIFKQLLQAKALQFLQIDSCRLGSVNENLSVLLMAKKFEIPVCPHAGGVGLCELVQHLIIFDYISVSASLENRVCEYVDHLHEHFKYPVMIQRASYMPPKDPGYSTEMKEESVKKHQYPDGEVWKKLLPAQEN

SEQ ID NO: 2212 - protein, 139 aa, Homo sapiens
  MISC_FEATURE (128): Xaa equals any of the twenty naturally occurring L-amino acids
PGQSRWQGPPLPLCQAGSAKSGEPGAGGKAGDSPALPPPPLGAQQLLRKVWHPWRGGAPGWAGSRWPGAWRCAAGACMAPRGTQAEESPFVGNPGNITGARGLTGTLRCQLQVQGEPPEVHWLRDGQXLELADSTQTQV

SEQ ID NO: 2213 - protein, 195 aa, Homo sapiens
  MISC_FEATURE (186): Xaa equals any of the twenty naturally occurring L-amino acids
FLNRELIVKSSMATGGGPFEDGMNDQDLPNWSNENVDDRLNNMDWGAQQKKANRSSEKNKKKFGVESDKRVTNDISPESSPGVGRRRTKTPHTFPHSRYMSQMSVPEQAELEKLKQRINFSDLDQRSIGSDSQGRATAANNKRQLSENRKPFNFLPMQINTNKEQRCILQVPQTEETVGFSTVLKXCFAFWFLSN

SEQ ID NO: 2214 - protein, 231 aa, Homo sapiens
  MISC_FEATURE (178): Xaa equals any of the twenty naturally occurring L-amino acids
LERFASRRPQVLAVRTVCDLVLGKMDKDCEMKRTTLDSPLGKLELSGCEQGLHEIKLLGKGTSAADAVEVPAPAAVLGGPEPLMQCTAWLNAYFHQPEAIEEFPVPALHHPVFQQESFTRQVLWKLLKVVKFGEVISYQQLAALAGNPKAARAVGGAMRGNPVPILIPCHRVVCSSGXVGNYSGGLAVKEWLLAHEGHRLGKPGLGGSSGLAGAWLKGAGATSGSPPAGRN

SEQ ID NO: 2215 - protein, 139 aa, Homo sapiens
PGSTHASAHASARPTRKMAPQKDRKPKRSTWRFNLDLTHPVEDGIFDSGNFEQFLREKVKVNGKTGNLGNVVHIERFKNKITVVSEKQFSKRYLKYLTKKYLKKNNLRDWLRVVASDKETYELRYFQISQDEDESESED

SEQ ID NO: 2216 - protein, 130 aa, Homo sapiens
RRRWLARLGEGVSKMMLQHPGQVSASEVSASAIVPCLSPPGSLVFEDFANLTPFVKEELRFAIQNKHLCHRMSSALESVTVSDRPLGVSITKAEVAPEEDERKKRRRERNKIAAAKCRNKKKEKTDACRK

SEQ ID NO: 2217 - protein, 184 aa, Homo sapiens
  MISC_FEATURE (126): Xaa equals any of the twenty naturally occurring L-amino acids
  MISC_FEATURE (131): Xaa equals any of the twenty naturally occurring L-amino acids
  MISC_FEATURE (136): Xaa equals any of the twenty naturally occurring L-amino acids
  MISC_FEATURE (137): Xaa equals any of the twenty naturally occurring L-amino acids
  MISC_FEATURE (143): Xaa equals any of the twenty naturally occurring L-amino acids
  MISC_FEATURE (146): Xaa equals any of the twenty naturally occurring L-amino acids
  MISC_FEATURE (147): Xaa equals any of the twenty naturally occurring L-amino acids
  MISC_FEATURE (149): Xaa equals any of the twenty naturally occurring L-amino acids
  MISC_FEATURE (152): Xaa equals any of the twenty naturally occurring L-amino acids
  MISC_FEATURE (159): Xaa equals any of the twenty naturally occurring L-amino acids
  MISC_FEATURE (163): Xaa equals any of the twenty naturally occurring L-amino acids
GSAPETSPEKCSSRAKSCKVIRKNIVKKCLELFSELAEDKENYKKFYEAFSKNLKLGIHEDSTNRRRLSELLRYHTSQSGDEMTSLSEYVSRMKETQKSIYYITGESKEQVANSAFVERVRKRGFXVVYMXEPIDXXCVQQLXEFXXKXLVXVTKEVWXCLRXRREEEDGREQGKFRPCSSEES

SEQ ID NO: 2218 - protein, 510 aa, Homo sapiens
  MISC_FEATURE (228): Xaa equals any of the twenty naturally occurring L-amino acids
  MISC_FEATURE (352): Xaa equals any of the twenty naturally occurring L-amino acids
TSEESRPRLSQLSVTDVTTSSLRLNWEAPPGAFDSFLLRFGVPSPSTLEPHPRPLLQRELMVPGTRHSAVLRDLRSGTLYSLTLYGLRGPHKADSIQGTARTLSPVLESPRDLQFSEIRETSAKVNWMPPPSRADSFKVSYQLADGGEPQSVQVDGQARTQKLQGLIPGARYEVTVVSVRGFEESEPLTGFLTTVPDGPTQLRALNLTEGFAVLHWKPPQNPVDTYDXQVTAPGAPPLQAETPGSAVDYPLHDLVLHTNYTATVRGLRGPNLTSPASITFTTGLEAPRDLEAKEVTPRTALLTWTEPPVRPAGYLLSFHTPGGQTQEILLPGGITSHQLLGLFPSTSYNARXQAMWGQSLLPPVSTSFTTGGLRIPFPRDCGEEMQNGAGASRTSTIFLNGNRERPLNVFCDMETDGGGWLVFQRRMDGQTDFWRDWEDYAHGFGNISGEFWLGNEALHSLTQAGDYSMRVDLRAGDEAVFAQYDSFHVDSAAEYYRLHLEGYHGTAGTP

SEQ ID NO: 2219 - protein, 105 aa, Homo sapiens
  MISC_FEATURE (59): Xaa equals any of the twenty naturally occurring L-amino acids
AHLAASLPLQAQPSAMACPLDQAIGLLVAIFHKYSGREGDKHTLSKKELKELIQKELTXGSKLQDAEIARLMEDLDRNKDQEVNFQEYVTFLGALALIYNEALKG

SEQ ID NO: 2220 - protein, 66 aa, Homo sapiens
AEIQVFQVGLVSWGLYNPCLGSADKNSRKRAPRSKVPPPRDFHINLFRMQPWLRQHLGDVLNFLPL

SEQ ID NO: 2221 - protein, 453 aa, Homo sapiens
LTIVSALSLRRTETMAPTQGPRAPLEFGGPLGAAALLLLLPATMFHLLLAARSGPARLLGPPASLPGLEVLWSPRALLLWLAWLGLQAALYLLPARKVAEGQELKDKSRLRYPINGFQALVLTALLVGLGMSAGLPLGALPEMLLPLAFVATLTAFIFSLFLYMKAQVAPVSALAPGGNSGNPIYDFFLGRELNPRICFFDFKYFCELRPGLIGWVLINLALLMKEAELRGSPSLAMWLVNGFQLLYVGDALWHEEAVLTTMDITHDGFGFMLAFGDMAWVPFTYSLQAQFLLHHPQPLGLPWPLSSASSMGLRPSLQPQGGNCWCLGGGVWSAIPTILETSSWLWLGPCPAGCHTCCPTSTSSTSPRCWCTVRPGMSGSACRSTAWPGRSTAGVCLTASCPTSTEAAPPPQVGACAHSSTSTPRTRSLDTLGTQGLAPHPALRMNNLREEVV

SEQ ID NO: 2222 - protein, 111 aa, Homo sapiens
  MISC_FEATURE (95): Xaa equals any of the twenty naturally occurring L-amino acids
  MISC_FEATURE (104): Xaa equals any of the twenty naturally occurring L-amino acids
CSCTVRARRRLNRGLRRKQHSLLKRLRKAKKEAPPMEKPEVVKTHLRDMIILPEMVGSMVGVYNGKTFNQVEIKPEMIGHYLGEFSITYKPVKHXRPGIGATHXSRFIPLK

SEQ ID NO: 2223 - protein, 106 aa, Homo sapiens
GRGLNSPKELRPLTRAAPAAAACTGPGAAMPKCPKCNKEVYFAERVTSLGKDWHRPCLKCEKCGKTLTSGGHAEHEGKPYCNHPCYAAMFGPKGFGRGGAESHTFK

SEQ ID NO: 2224 - protein, 259 aa, Homo sapiens
  MISC_FEATURE (7): Xaa equals any of the twenty naturally occurring L-amino acids
LLDSLKXDYAGKPQPPIKSERRNPPSYAMAGKKVLIVYAHQEPKSFNGSLKNVAVDELSRQGCTVTVSDLYAMNFEPRATDKDITGTLSNPEVFNYGVETHEAYKQRSLASDITDEQKKVREADLVIFQFPLYWFSVPAILKGWMDRVLCQGFAFDIPGFYDSGLLQGKLALLSVTTGGTAEMYTKTGVNGDSRYFLWPLQHGTLHFCGFKVLAPQISFAPEIASEEERKGMVAAWSQRLQTIWKEEPIPCTAHWHFGQ

SEQ ID NO: 2225 - protein, 21 aa, Homo sapiens
DRGRREVSDIKTYHKASTIKE

SEQ ID NO: 2226 - protein, 81 aa, Homo sapiens
  MISC_FEATURE (3): Xaa equals any of the twenty naturally occurring L-amino acids
CGXLLMAQGLSASALEGLKTEEGSVRGALPAVSSPPAPVSPSSPTTHNGELEPSFSPLLGEGKTPETLLPQKCWGQGGPGR

SEQ ID NO: 2227 - protein, 132 aa, Homo sapiens
ARAARAEIVLGLLVWTLIAGTEYFRVPAFGWVMFVAVFYWVLTVFFLIIYITMTYTRIPQVPWTTVGLCFNGSAFVLYLSAAVVDASSVSPEKDSHNFNSWAASSFFAFLVTICYAGNTYFSFIAWRSRTIQ

SEQ ID NO: 2228 - protein, 37 aa, Homo sapiens
  MISC_FEATURE (25): Xaa equals any of the twenty naturally occurring L-amino acids
ESVELPLTHPEYYEEMGIKPPKGVXLYGPPGTGMLCF

SEQ ID NO: 2229 - protein, 28 aa, Homo sapiens
  MISC_FEATURE (1): Xaa equals any of the twenty naturally occurring L-amino acids
XVPVVPATWKAEVGGSTEPGEVKGCSEP

SEQ ID NO: 2230 - protein, 28 aa, Homo sapiens
AANWTAGFCGPRRPLVGIRPRRGAPSSC

SEQ ID NO: 2231 - protein, 21 aa, Homo sapiens
  MISC_FEATURE (6): Xaa equals any of the twenty naturally occurring L-amino acids
YPLDFXEQWPLHGSHAYSTIL

SEQ ID NO: 2232 - protein, 36 aa, Homo sapiens
EQMSQVLDAMFEKLVKDGEHVIDQGDDGDNFYVIDR

SEQ ID NO: 2233 - protein, 536 aa, Homo sapiens
ASGEACGAAAMAALTIATGTGNWFSALALGVTLLKCLLIPTYHSTDFEVHRNWLAITHSLPISQWYYEATSEWTLDYPPFFAWFEYILSHVAKYFDQEMLNVHNLNYSSSRTLLFQRFSVIFMDVLFVYAVRECCKCIDGKKVGKELTEKPKFILSVLLLWNFGLLIVDHIHFQYNGFLFGLMLLSIARLFQKRHMEGAFLFAVLLHFKHIYLYVAPAYGVYLLRSYCFTANKPDGSIRWKSFSFVRVISLGLVVFLVSALSLGPFLALNQLPQVFSRLFPFKRGLCHAYWAPNFWALYNALDKVLSVIGLKLKFLDPNNIPKASMTSGLVQQFQHTVLPSVTPLATLICTLIAILPSIFCLWFKPQGPRGFLRCLTLCALSSFMFGWHVHEKAILLAILPMSLLSVGKAGDASIFLILTTTGHYSLFPLLFTAPELPIKILLMLLFTIYSISSLKTLFRKEKPLFNWMETFYLLGLGPLEVCCEFVFPFTSWKVKYPFIPLLLTSVYCAVGITYAWFKLYVSVLIDSAIGKTKKQ

SEQ ID NO: 2234 - protein, 84 aa, Homo sapiens
PSRGKMELEAMSRYTSPVNPAVFPHLTVVLLAIGMFFTAWFFVYEVTSTKYTRDIYKELLISLVASLFMGFGVLFLLLWVGIYV

SEQ ID NO: 2235 - protein, 290 aa, Homo sapiens
QRSDTALEEAVAEVLDHRPIEPKHWPPCHVSVELVGSCATLVTERILQGAPEILDRQTAALLHGTIILDCVNMDLKIGKATPKDSKYVEKLEALFPDLPKRNDIFDSLQKAKFDVSGLTTEQMLRKDQKTIYRQGVKVAISAIYMDLEICEVLERSHSPPLKLTPASSTHPNLHAYLQGNTQVSRKKLLPLLQEALSAYFDSMKIPSGQPETADVSREQVDKELDRASNSLISGLSQDEEDPPLPPTPMNSLVDECPLDQGLPKLSAEAVFEKCSQISLSQSTTASLSKK

SEQ ID NO: 2236 - protein, 84 aa, Homo sapiens
SRLSIPPPRCVFSHHPGCVRLSLEITLTSVFKKKGQMQWLMPVILALWKAEAGRSPEVRSSRPAWPTRRNPVSTKNTKISQAWW

SEQ ID NO: 2237 - protein, 67 aa, Homo sapiens
PTSQCSPRRSQLLGRLRQENGVNPGGGACSELRSLHCTLAWATEQDSTSKKKNKTVIRMKKAKAKKG

SEQ ID NO: 2238 - protein, 45 aa, Homo sapiens
GLTMLLRLVSNSWAQVISLPFFLFFFHFGDGVSVARAGVQGCNLG

SEQ ID NO: 2239 - protein, 153 aa, Homo sapiens
  MISC_FEATURE (10): Xaa equals any of the twenty naturally occurring L-amino acids
  MISC_FEATURE (124): Xaa equals any of the twenty naturally occurring L-amino acids
  MISC_FEATURE (130): Xaa equals any of the twenty naturally occurring L-amino acids
  MISC_FEATURE (139): Xaa equals any of the twenty naturally occurring L-amino acids
  MISC_FEATURE (145): Xaa equals any of the twenty naturally occurring L-amino acids
  MISC_FEATURE (150): Xaa equals any of the twenty naturally occurring L-amino acids
YYRESWYACXYRSGIPGGWSPTWSPGLKRSARLGLPQCWDSRRELPRPAYLLFLLSWGSPSPSAWQEGGGARRKEVQNTQRCPRFRLALALLPPSSNKARETSAGNWPAVMGEAKKTALGSRRXPERGSXPHFVAAVAXLHALPXPLLLXPGK

SEQ ID NO: 2240 - protein, 145 aa, Homo sapiens
NTAKFTNCTCCIVKPHAVSEGLLGKILMAIRDAGFEISAMQMFNMDRVNVEEFYEVYKGVVTEYHDMVTEMYSGPCVAMEIQQNNATKTFREFCGPADPEIARHLRPGTLRAIFGKTKIQNAVHCTDLPEDGLLEVQYFFKILDN

SEQ ID NO: 2241 - protein, 209 aa, Homo sapiens
LVPRPRPRQLCAVIHSLLRPGAPFPARRRARQLGVQRPRNHEQVSRSSEAPGTPAHAMADSERLSAPGCWAACTNFSRTRKGILLFAEIILCLVILICFSASTPGYSSLSVIEMILAAIFFVVYMCDLHTKIPFINWPWSDFFRTLIAAILYLITSIVVLVERGNHSKIVAGVLGLIATCLFGYDAYVTFPVRQPRHTAAPTDPADGPV

SEQ ID NO: 2242 - protein, 287 aa, Homo sapiens
  MISC_FEATURE (189): Xaa equals any of the twenty naturally occurring L-amino acids
  MISC_FEATURE (193): Xaa equals any of the twenty naturally occurring L-amino acids
  MISC_FEATURE (201): Xaa equals any of the twenty naturally occurring L-amino acids
LLAPTRRHSPGSPAFAPSSRATAMCPRAARAPATLLLALGAVLWPAAGAWELTILHTNDVHSRLEQTSEDSSKCVNASRCMGGVARLFTKVQQIRRAEPNVLLLDAGDQYQGTIWFTVYKGAEVAHFMNALRYDAMALGNHEFDNGVEGLIEPLLKEAKFPILSANIKAKGPLASQISGLYLPYKVLPXGDEXVGIVGYTXKETPFLSNPGTNLVFEDEITALQPEVDKLKTLNVNKIIALGHSGFEMDKLIAQKVRGVDVVVGGHSNTFLYTGNCFKRIAWARMSR

SEQ ID NO: 2243 - protein, 200 aa, Homo sapiens
  MISC_FEATURE (198): Xaa equals any of the twenty naturally occurring L-amino acids
  MISC_FEATURE (200): Xaa equals any of the twenty naturally occurring L-amino acids
VGPGAAWRRPHSGIMAQVAMSTLPVEDEESSESRMVVTFLMSALESMCKELAKSKAEVACIAVYETDVFVVGTERGRAFVNTRKDFQKDFVKYCVEEEEKAAEMHKMKSTTQANRMSVDAVEIETLRKTVEDYFCFCYGKALGKSTVVPVPYEKMLRDQSAVVVQGLPEGVAFKHPENYDLATLKWILENKAGISFIXKX

SEQ ID NO: 2244 - protein, 154 aa, Homo sapiens
  MISC_FEATURE (11): Xaa equals any of the twenty naturally occurring L-amino acids
  MISC_FEATURE (17): Xaa equals any of the twenty naturally occurring L-amino acids
  MISC_FEATURE (18): Xaa equals any of the twenty naturally occurring L-amino acids
  MISC_FEATURE (23): Xaa equals any of the twenty naturally occurring L-amino acids
  MISC_FEATURE (25): Xaa equals any of the twenty naturally occurring L-amino acids
  MISC_FEATURE (26): Xaa equals any of the twenty naturally occurring L-amino acids
  MISC_FEATURE (28): Xaa equals any of the twenty naturally occurring L-amino acids
  MISC_FEATURE (75): Xaa equals any of the twenty naturally occurring L-amino acids
FILELQMQSIXEKKMKXXRNIAXHXXNXPSLITFLCKNCSVLACSGEDIHVIEKMHHVNMTPEFKELYIVRENKXLQKKCADYQINGEIICKCGQAWGTMMVHKGLDLPCLKIRNFVVVFKNNSTKKQYKKWVELPITFPNLDYSECCLFSDED

SEQ ID NO: 2245 - protein, 254 aa, Homo sapiens
  MISC_FEATURE (1): Xaa equals any of the twenty naturally occurring L-amino acids
XIEINPHVKGTKAGAPPRCGRSRTSGSPGLQEFGTSSSTPARPSSHHSACFLGPEIMPLGLLWLGLALLGALHAQAQDSTSDLIPAPPLSKVPLQQNFQDNQFQGKWYVVGLAGNAILREDKDPQKMYATIYELKEDKSYNVTSVLFRKKKCDYWIRTFVPGCQPGEFTLGNIKSYPGLTSYLVRVVSTNYNQHAMVFFKKVSQNREYFKITLYGRTKELTSELKENFIRFSKSLGLPENHIVFPVPIDQCIDG

SEQ ID NO: 2246 - protein, 128 aa, Homo sapiens
  MISC_FEATURE (104): Xaa equals any of the twenty naturally occurring L-amino acids
  MISC_FEATURE (109): Xaa equals any of the twenty naturally occurring L-amino acids
  MISC_FEATURE (117): Xaa equals any of the twenty naturally occurring L-amino acids
AGGQRGGAESERQHLQQRVLGELCSRNTGGDAAGAQRENATRRTAGTLSLEASQALKEKAELQAQLAALSTKLQAQVECSHSSQQRQDSLSSEVDTLKQSCWDXERAMXDLAEHAGXKKCQLASFQQR

SEQ ID NO: 2247 - protein, 55 aa, Homo sapiens
  MISC_FEATURE (49): Xaa equals any of the twenty naturally occurring L-amino acids
FPVSLFSFAYTSQVYTVNNVNVITKIRTEHLTEEEKKRYKGNHHHPPTXCFVVIF

SEQ ID NO: 2248 - protein, 146 aa, Homo sapiens
  MISC_FEATURE (131): Xaa equals any of the twenty naturally occurring L-amino acids
  MISC_FEATURE (139): Xaa equals any of the twenty naturally occurring L-amino acids
  MISC_FEATURE (144): Xaa equals any of the twenty naturally occurring L-amino acids
ELRDIPLRPHPPDPQAPQRRSAPELPEGILKGGSLPQEDPPTWSEEEDGASERGNVVVETLHRARLRGQLPSSPTHADSAGESPWESSGEEEEEGPLFLKAGHTSLRPMRAEDMLREIREELASQRIEGAXEPRDSRPXKLNRXQL

SEQ ID NO: 2249 - protein, 168 aa, Homo sapiens
  MISC_FEATURE (5): Xaa equals any of the twenty naturally occurring L-amino acids
RGLAXKHPGRVGQAALYGCGCWAENTGAHNPYSTAVSTSGCGEHLVRTILARECSHALQAEDAHQALLETMQNKFISSPFLASEDGVLGGVIVLRSCRCSAEPDSSQNKQTLLVEFLWSHTTESMCVGYMSAQDGKAKTHISRLPPGAVAGQSVAIEGGVCRLESPVN

SEQ ID NO: 2250 - protein, 49 aa, Homo sapiens
  MISC_FEATURE (2): Xaa equals any of the twenty naturally occurring L-amino acids
  MISC_FEATURE (9): Xaa equals any of the twenty naturally occurring L-amino acids
AXTNFTQEXAMTMITPSSNTTHYRESWYACRYRSGIPGSTHASGRQRLQ

SEQ ID NO: 2251 - protein, 76 aa, Homo sapiens
KVTEDTSSVLRSPMPGVVVAVSVKPGDAVAEGQEICVIEAMKMQNSMTAGKTGTVKSVHCQAGDTVGEGDLLVELE

SEQ ID NO: 2252 - protein, 159 aa, Homo sapiens
  MISC_FEATURE (146): Xaa equals any of the twenty naturally occurring L-amino acids
ARRSDYKTQQIINPAESQRPRAPPLPMSSYFVNSTFPVTLASGQESFLGQLPLYSSGYADPLRHYPAPYGPGPGQDKGFATSSYYPPAGGGYGRAAPCDYGPAPAFYREKESACALSGADEQPPFHPEPRKSDCAQTRACSARQKXRSAPLRSTRGCSG

SEQ ID NO: 2253 - protein, 110 aa, Homo sapiens
  MISC_FEATURE (110): Xaa equals any of the twenty naturally occurring L-amino acids
RTPESWRLTPPAKVGGLDFSPVQTSQGASDPLPDPLGLMDLSTTPLQSAPPLESPQRLLSSEPLDLISVPFGNSSPSDIDVPKPGSPEPQVSGLAANRSLTEGLVLGHNX

SEQ ID NO: 2254 - protein, 112 aa, Homo sapiens
  MISC_FEATURE (76): Xaa equals any of the twenty naturally occurring L-amino acids
WMKMRKTEPRELLETSLRKKRRDQFNVLIKELSSMLPGNTRKMDKTTVLEKVIGFLQKHNEVSAQTEICDIQQDWXPSFLSNEEFTQLMLESHFRDCEESRCHVLVARMFPF

SEQ ID NO: 2255 - protein, 408 aa, Homo sapiens
KIMAHYGSIQYCFHTCTLETKFPIIPYIPTLITQLTQKLLAVSKNPSKPHFNHYMFEAICLSIRITCKANPAAVVNFEEALFLVFTEILQNDVQEFIPYVFQVMSLLLETHKNDIPSSYMALFPHLLQPVLWERTGNIPALVRLLQAFLERGSNTIASAAADKIPGLLGVFQKLIASKANDHQGFYLLNSIIEHMPPESVDQYRKQIFILLFQRLQNSKTTKFIKSFLVFINLYCIKYGALALQEIFDGIQPKMFGMVLEKIIIPEIQKVSGNVEKKICAVGITKLLTECPPMMDTEYTKLWTPLLQSLIGLFELPEDDTIPDEEHFIDIEDTPGYQTAFSQLAFAGKKEHDPVGQMVNNPKIHLAQSLHKLSTACPGRVPSMVSTSLNAEALQYLQGYLQAASVTLL

SEQ ID NO: 2256 - protein, 314 aa, Homo sapiens
ARAMKELISLAGPTDDIQSTVPQVHALNILRALFRDTRLGENIIPYVADGAKAAILGFTSPVWAVRNSSTLLFSALITRIFGVKRAKDEHSKTNRMTGREFFSRFPELYPFLLKQLETVANTVDSDMGEPNRHPSMFLLLLVLERLYASPMDGTSSALSMGPFVPFIMRCGHSPVYHSREMAARALVPFVMIDHIPNTIRTLLSTLPSCTDQCFRQNHIHGTLLQVFHLLQAYSDSKHGTNSDFQHELTDITVCTKAKLWLAKRQNPCLVTRAVYIDILFLLTCCLNRSAKDNQPVLESLASGRKSEGLSQDQS

SEQ ID NO: 2257 - protein, 166 aa, Homo sapiens
  MISC_FEATURE (63): Xaa equals any of the twenty naturally occurring L-amino acids
VHMRLVKIPPKLAYGSEGVSGVIPPDSVLHFDVLLMDIWNSEDQVQVHTYFTPPSCPRTIQVXDFVRYHYNGTFLDGTLFDSSHNRMKTYDTYVGIGWLIPGMDKGLLGMCVGEKRIITIPPFLAYGEEGDGKDIPGQASLVFDVALLDLHNPKDGISIENKVVPG

SEQ ID NO: 2258 - protein, 74 aa, Homo sapiens
  MISC_FEATURE (36): Xaa equals any of the twenty naturally occurring L-amino acids
  MISC_FEATURE (43): Xaa equals any of the twenty naturally occurring L-amino acids
THSVKIVYLRLVFLFMLNFFFNLRQGLILSPRLDCXGEILAYXSLDLLGSRDPPTSASRVAGTTGMCHHTQLIF

SEQ ID NO: 2259 - protein, 159 aa, Homo sapiens
  MISC_FEATURE (28): Xaa equals any of the twenty naturally occurring L-amino acids
  MISC_FEATURE (86): Xaa equals any of the twenty naturally occurring L-amino acids
  MISC_FEATURE (89): Xaa equals any of the twenty naturally occurring L-amino acids
  MISC_FEATURE (150): Xaa equals any of the twenty naturally occurring L-amino acids
DPRVRLVSPWLTVPWFLSCWNVTIGPPXSIWVTPGEASLIIRFSSPFDVPPNLGYFQYYVHYWEKAGIQKVKGPFKSNSIVLDGLXPLXEYCLQVKAHLFRTSCNTSRPGRLSNITCYETMMDATTKLQQVILIAVGVFLSLAALAGGCXFLVLRYKGW

SEQ ID NO: 2260 - protein, 45 aa, Homo sapiens
SSHLCLSSSWDYKCAPPCPANFIIFGRDGVSPCWPGWSPTPWEDF

SEQ ID NO: 2261 - protein, 184 aa, Homo sapiens
RPTRPPTRRAAEENRVLLAMVNPTVFFDIAVDGEPLGRVSFELFADKVPKTAENFRALSTGEKGFGYKGSCFHRIIPGFMCQGGDFTRHNGTGGKSIYGEKFEDENFILKHTGPGILSMANAGPNTNGSQFFICTAKTEWLDGKHVVFGKVKEGMNIVEAMERFGSRNGKTSKKITIADCGQLE

SEQ ID NO: 2262 - protein, 113 aa, Homo sapiens
TRPLSALPGWGPAHLQRPLLGPASCLGILRPAMTAHSFALPVIIFTTFWGLVGIAGPWFVPKGPNRGVIITMLVATAVCCYLFWLIAILAQLNPLFGPQLKNETIWYVRFLWE

SEQ ID NO: 2263 - protein, 63 aa, Homo sapiens
PPFFFFFFFFFFFFFFFFFFFFFFFFFFFFFFFFFFFFFFFSWFLQQTSKFTHGTKVFNKRHA

SEQ ID NO: 2264 - protein, 360 aa, Homo sapiens
APLSAGSGRGGFFRLSYDEAFAMANDPLEGFHEVNLASPTSPDLLGVYESGTQEQTTSPSVIYRPHPSALSSVPIQANALDVSELPTQPVYSSPRRLNCAEISSISFHVTDPAPCSTSGVTAGLTKLTTRKDNYNAEREFLQGATITEACDGSDDIFGLSTDSLSRLRSPSVLEVREKGYERLKEELAKAQRELKLKDEECERLSKVRDQLGQELEELTASLFEEAHKMVREANIKQATAEKQLKEAQGKIDVLQAEVAALKTLVLSSSPTSPTQEPLPGGKTPFKKGHTRNKSTSSAMSGSHQDLSVIQPIVKDCKEADLSLYNEFRLWKDEPTMDRTVSFLRQNLPGRYLSMFNILKK

SEQ ID NO: 2265 - protein, 435 aa, Homo sapiens
AFPASLFKIGCQESWTVIICLVFCQDTMIPGNRMLMVVLLCQVLLGGASHASLIPETGKKKVAEIQGHAGGRRSGQSHELLRDFEATLLQMFGLRRRPQPSKSAVIPDYMRDLYRLQSGEEEEEQIHSTGLEYPERPASRANTVRSFHHEEHLENIPGTSENSAFRFLFNLSSIPENEVISSAELRLFREQVDQGPDWERGFHRINIYEVMKPPAEVVPGHLITRLLDTRLVHHNVTRWETFDVSPAVLRWTREKQPNYGLAIEVTHLHQTRTHQGQHVRISRSLPQGSGNWAQLRPLLVTFGHDGRGHALTRRRRAKRSPKHHSQRARKKNKNCRRHSLYVDFSDVGWNDWIVAPPGYQAFYCHGDCPFPLADHLNSTNHAIVQTLVNSVNSSIPKACCVPTELSAISMLYLDEYDKVVLKNYQEMVVEGCGCR

SEQ ID NO: 2266 - protein, 99 aa, Homo sapiens
RSSKLTLTKGNKSWSSTAVAAALELVDPPGCRNSARADIKSHRKVFLINLYKIVISPVKPIYIKNNVQKMLLPAFSPLLPTPCSPSNLRPVCLCGQFLL

SEQ ID NO: 2267 - protein, 806 aa, Homo sapiens
PRVRRRRGLRRRREAVWFEVVNMDFSRLHMYSPPQCVPENTGYTYALSSSYSSDALDFETEHKLDPVFDSPRMSRRSLRLATTACTLGDGEAVGADSGTSSAVSLKNRAARTTKQRRSTNKSAFSINHVSRQVTSSGVSYGGTVSLQDAVTRRPPVLDESWIREQTTVDHFWGLDDDGDLKGGNKAAIQGNGDVGAAAATAHNGFSCSNCSMLSERKDVLTAHPAAPGPVSRVYSRDRNQKCYFLLQILRRIGAVGQAVSRTAWSALWLAVVAPGKAASGVFWWLGIGWYQFVTLISWLNVFLLTRCLRNICKFLVLLIPLFLLLGLSLRGQGNFFSFLPVLNWASMHRTQRVDDPQDVFKPTTSRLKQPLQGDSEAFPWHWMSGVEQQVASLSGQCHHHGENLRELTTLLQKLQARVDQMEGGAAGPSASVRDAVGQPPRETDFMAFHQEHEVRMSHLEDILGKLREKSEAIQKELEQTKQKTISAVGEQLLPTVEHLQLELDQLKSELSSWRHVKTGCETVDAVQERVDVQVREMVKLLFSEDQQGGSLEQLLQRFSSQFVSKGDLQTMLRDLQLQILRNVTHHVSVTKQLPTSEAVVSAVSEAGASGITEAQARAIVNSALKLYSQDKTGMVDFALESGGGSILSTRCSETYETKTALMSLFGIPLWYFSQSPRVVIQPDIYPGNCWAFKGSQGYLVVRLSMMIHPAAFTLEHIPKTLSPTGNISSAPKDFAVYGLENEYQEEGQLLGQFTYDQDGESLQMFQALKRPDDTAFQIVELRIFSNWGHPEYTCLYRFRVHGEPVK

SEQ ID NO: 2268 - protein, 227 aa, Homo sapiens
HELPLRIFLAVANSMAFQNDIFEWSRDHRAHHKYSETDADPHNARRGFFFSHIGWLFVRKHRDVIEKGRKLDVTDLLADPVVRIQRKYYKISVVLMCFVVPTLVPWYIWGESLWNSYFLASILRYTISLNISWLVNSAAHMYGNRPYDKHISPRQNPLVALGAIGEGFHNYHHTFPFDYSASEFGLNFNPTTWFIDFMCWLGLATDRKRATKPMIEARKARTGDSSA

SEQ ID NO: 2269 - protein, 768 aa, Homo sapiens
GSRDKQWKSCGLFHLWIVNLSLLLAPGRGQHHHGMIPNQHNAGAGSHQPAVFRMAVLDTDLDHILPSSVLPPFWAKLVVGSVAIVCFARSYDGDFVFDDSEAIVNNKDLQAETPLGDLWHHDFWGSRLSSNTSHKSYRPLTVLTFRINYYLSGGFHPVGFHVVNILLHSGISVLMVDVFSVLFGGLQYTSKGRRLHLAPRASLLAALLFAVHPVHTECVAGVVGRADLLCALFFLLSFLGYCKAFRESNKEGAHSSTFWVLLSIFLGAVAMLCKEQGITVLGLNAVFDILVIGKFNVLEIVQKVLHKDKSLENLGMLRNGGLLFRMTLLTSGGAGMLYVRWRIMGTGPPAFTEVDNPASFADSMLVRAVNYNYYYSLNAWLLLCPWWLCFDWSMGCIPLIKSISDWRVIALAALWFCLIGLICQALCSEDGHKRRILTLGLGFLVIPFLPASNLFFRVGFVVAERVLYLPSVGYCVLLTFGFGALSKHTKKKKLIAAVVLGILFINTLRCVLRSGEWRSEEQLFRSALSVCPLNAKVHYNIGKNLADKGNQTAAIRYYREAVRLNPKYVHAMNNLGNILKERNELQEAEELLSLAVQIQPDFAAAWMNLGIVQNSLKRFEAAEQSYRTAIKHRRKYPDCYYNLGRLYADLNRHVDALNAWRNATVLKPEHSLAWNNMIILLDNTGNLAQAEAVGREALELIPNDHSLMFSLANVLGKSQKYKESEALFLKAIKANPNAASYHGNLAVLYHRWGHLDLAKKHYEISLQL

SEQ ID NO: 2270 - protein, 133 aa, Homo sapiens
TRPAGPVCGKILWTITMGSKGGFILLLILAVLCRSGHSLTCYACIDRETCNKTTVCSVNHDACLLVKADPKLFYRQCWKFDDCSYLSISKALGLKKLQYSCCQKDLCNGSARVSGMTALMLLPLLAAALTLCL

SEQ ID NO: 2271 - protein, 309 aa, Homo sapiens
CQHPHQQCVQHRGPCGPGAISGLRSGHRRRGRAAGEKAGQHSPLREEHVTCVQSILDEFLQTYGSLIPLSTDEVVEKLEDIFQQEFSTPSRKGLVLQLIQSYQRMPGNAMVRGFRVAYKRHVLTMDDLGTLYGQNWLNDQVMNMYGDLVMDTVPEKVHFFNSFFYDKLRTKGYDGVKRWTKNVDIFNKELLLIPIHLEVHWSLISVDVRRRTITYFDSQRTLNRRCPKHIAKYLQAEAVKKDRLDFHQGWKGYFKMNVARQNNDSDCGAFVLQYCKHLALSQPFSFTQQDMPKLRRQIYKELCHCKLTV

SEQ ID NO: 2272 - protein, 499 aa, Homo sapiens
ASAFLDTPGHAAFSAMRARGAQVTDIVVLVVAADDGVMKQTVESIQHAKDAQVPIILAVNKCDKAEADPEKVKKELLAYDVVCEDYGGDVQAVPVSALTGDNLMALAEATVALAEMLELKADPNGPVEGTVIESFTDKGRGLVTTAIIQRGTLRKGSVLVAGKCWAKVRLMFDENGKTIDEAYPSMPVGITGWRDLPSAGEEILEVESEPRAREVVDWRKYEQEQEKGQEDLKIIEEKRKEHKEAHQKAREKYGHLLWKKRSILRFLERKEQIPLKPKEKRERDSNVLSVIIKGDVDGSVEAILNIIDTYDASHECELELVHFGVGDISANDVNLAETFDGVIYGFNVNAGNVIQQSAAKKGVKIKLHKIIYRLVEDLQEELSSRLPCAVEEHPVGEASILATFSVTEGKKKVPVAGCRVQKGQLEKQKKFKLTRNGHVIWKGSLTSLKHHKDDISIVKTGMDCGLSLDEDNMEFQVGDRIVCYEEKQIQAKTSWDPGF

SEQ ID NO: 2273 - protein, 48 aa, Homo sapiens
YGSRHCICFLQAISEILFLKNPARHGGSQVQDQPGQQSKTLTLRKKSK

SEQ ID NO: 2274 - protein, 77 aa, Homo sapiens
RETACCGRDARGAAPAAMAVTALAARTWLGVWGVRTMQARGFGSDQSENVDRGAGSIREAGGAFGKREQAEEERYFR

SEQ ID NO: 2275 - protein, 120 aa, Homo sapiens
  MISC_FEATURE (2): Xaa equals any of the twenty naturally occurring L-amino acids
PXFFFFFFFFFFFFFFFFFFFVKHNLFFVERLNKVKIVLRGHRPSPALQVPGVRRLCPPTPTPPHAPCCRGRREGGGQGEGGQPGDREKQGGCGEGARDDGSSPPTTTCCHWPSEAKSLW

SEQ ID NO: 2276 - protein, 125 aa, Homo sapiens
GVLYGVRPTKQRELAFAVTQILCSQVTAGSGWLTHSVMFHCICIKIMAQPSPQNPALFIIASFIINLGKVFGTQSIPGDANDDFFLFFLRRSFALVAQAGVQWHYIGSPQPPPLGFKRFSCLSLS

SEQ ID NO: 2277 - protein, 178 aa, Homo sapiens
PRVRPRVRPRVRTALSNLITWQKVDYDFSYHQMEFPCNINVFITSEGRSLLPADCQIHLQPQLIPPNMEEYMNSLLSAVLPSVLNKFRIYLTLLRFLEYSISDEITKAVEDDFVEMRKNDPQSITADDLHQLLVVARCLSLSAGQTTLSRERWLRAKQLESLRRTRLQQQKCVNGNEL

SEQ ID NO: 2278 - protein, 314 aa, Homo sapiens
FSGRPTRPVAVKMALVASVRVPARVLLRAGARLPGAALGRTERAAGGGDGARRFGSQRVLVEPDAGAGVAVMKFKNPPVNSLSLEFLTELVISLEKLENDKSFRGVILTSDRPGVFSAGLDLTEMCGRSPAHYAGYWKAVQELWLRLYQSNLVLVSAINGACPAGGCLVALTCDYRILADNPRYCIGLNETQLGIIAPFWLKDTLENTIGHRAAERALQLGLLFPPAEALQVGIVDQVVPEEQVQSTALSAIAQWMAIPDHARQLTKAMMRKATASRLVTQRDADVQNFVSFISKDSIQKSLQMYLERLKEEKG

SEQ ID NO: 2279 - protein, 346 aa, Homo sapiens
IEDPASKMWQLLATLSCLVVLTGAQRRPPFQPLSDELVHYVNKQNTTWKAGHNFHSVDQSYLKKLCGTFLGGPKLPQRLWFAENMILPESFDSREQWPNCPTIKEIRDQGSCGSCWAFGAVEAISDRICIRTNGHVSVEVSAEDMLTCCGDQCGDGCNGGFPAEAWNFWTKKGLVSGGLYDSHVGCRPYSIPPCEHHVNGSRPPCTGEGDTPKCSKICEPGYTPSYKEDKHYGCSSYSVSSSEKEIMAEIYKNGPVEAAFSVYSDFLMYKSGVYQHVTGEMMGGHAVRILGWGVENGTPYWLVGNSWNTDWGDNGFFKILRGQDHCGIESEIVAGIPCTDQYWKKI

SEQ ID NO: 2280 - protein, 84 aa, Homo sapiens
FVTILSIIITLFFIFQLKVSKYSFPENPEPKSLTTSKSTTPWRKQMNENLFSSFITPTIIGLPIVIIITMFPSIIFPSPTRLNQ

SEQ ID NO: 2281 - protein, 222 aa, Homo sapiens
  MISC_FEATURE (185): Xaa equals any of the twenty naturally occurring L-amino acids
DQLLLALLKCTDTELQLRRDAIFCQALVAAVCTFSEQLLAALGYRYNNNGEYEESSRDASRKWLEQVAATGVLLHCQSLLSPATVKEERTMLEDIWVTLSELDNVTFSFKQLDENYVANTNVFYHIEGSRQALKVIFYLDSYHFSKLPSRLEGGASLRLHTALFTKVLENVEGLPSPGSQAAEDXQQDINAHPWRKFSSITANSGHFTWSGLTCPRMPAPRR

SEQ ID NO: 2282 - protein, 161 aa, Homo sapiens
  MISC_FEATURE (38): Xaa equals any of the twenty naturally occurring L-amino acids
LWISVIETRLLAASTLEINRTVAYRLHLGARALAYGEXNLTFEGPLPEKIELLAHKGLLNLTYYQQIQVQKKDNKIFEISCCSDHRCKWLPASMNTVSTQSLTLAIDSCHGTVVALRYAWTTWPCEYKQCPLYHPSSALPAPPFIAFITDQGPGHQSNVAK

SEQ ID NO: 2283 - protein, 75 aa, Homo sapiens
  MISC_FEATURE (62): Xaa equals any of the twenty naturally occurring L-amino acids
  MISC_FEATURE (69): Xaa equals any of the twenty naturally occurring L-amino acids
KGHLQSQPHQANGRPVSRNSTTRRDWGSIFWNFKEKKLEPRISYPTKLSFIIQREIKYFLDXQMLREFXTTEPDL

SEQ ID NO: 2284 - protein, 58 aa, Homo sapiens
  MISC_FEATURE (3): Xaa equals any of the twenty naturally occurring L-amino acids
  MISC_FEATURE (32): Xaa equals any of the twenty naturally occurring L-amino acids
  MISC_FEATURE (48): Xaa equals any of the twenty naturally occurring L-amino acids
AQXRAHTHIYTMEYYSAIKRNEIIAFAATRVXLETIILSEVTQERKPXHHMFSLKGGS

SEQ ID NO: 2285 - protein, 103 aa, Homo sapiens
  MISC_FEATURE (69): Xaa equals any of the twenty naturally occurring L-amino acids
  MISC_FEATURE (70): Xaa equals any of the twenty naturally occurring L-amino acids
HELKMDHRLKCKKENSKTFRRKQEKSLRPRIRQRFLIYDIKAWSMKEKIVTFYLINIQNFCSLKETIKXXKRQTTDWDKVFIKHINVIRHYFIQNGILNVREQ

SEQ ID NO: 2286 - protein, 196 aa, Homo sapiens
  MISC_FEATURE (7): Xaa equals any of the twenty naturally occurring L-amino acids
IFYGFIXLLCSHAVFFFSLSLPPARVCPGLIVVTLAVCWMPNQIRRIMAAAKPKHDWTRSYFRAYMILLPFSETFFYLSSVINPLLYTVSSQQFRRVFVQVLCCRLSLQHANHEKRLRVHAHSTTDSARFVQRPLLFASRRQSSARRTEKIFLSTFQSEAEPQSKSQSLSLESLEPNSGAKPANSAAENGFQEHEV

SEQ ID NO: 2287 - protein, 33 aa, Homo sapiens
  MISC_FEATURE (7): Xaa equals any of the twenty naturally occurring L-amino acids
IQQYITXVINQDQILFISGMPGWFIIRNPNNVI

SEQ ID NO: 2288 - protein, 124 aa, Homo sapiens
LMRDFPCSTVTPPTLPASVPASVPASIPASVPWPWRLFLPPALGAQESPTAVGWGWGHSSPKPERLEPMASGSSPLHSPPDTEKGPWYLYLRNEDNINNDGRKTGLQGLWSLLGPGTRLVFQPC

SEQ ID NO: 2289 - protein, 31 aa, Homo sapiens
LLSPRLECKGAISAHCNLRLPGSSNSPASAT

SEQ ID NO: 2290 - protein, 327 aa, Homo sapiens
  MISC_FEATURE (175): Xaa equals any of the twenty naturally occurring L-amino acids
RRRVLSFEPRCSELVGGPRGERGSLGGEPGVSCLKMHSDAAAVNFQLNSHLSTLANIHKIYHTLNKLNLTEDIGQDDHQTGSLRSCSSSDCFNKVMPPRKKRRPASGDDLSAKKSRHDSMYRKYDSTRIKTEEEAFSSKRCLEWFYEYAGTDDVVGPEGMEKFCEDIGVEPENVXMLVLAWKLDAQNMGYFTLQEWLKGMTSLQCDTTEKLRNTLDYLRSFLNDSTNFKLIYRYAFDFAREKDQRSLDINTAKCMLGLLLGKIWPLFPVFHQFLEQSKYKVINKDQWCNVLEFSRTINLDLSNYDEDGAWPVLLDEFVEWYKDKQMS

SEQ ID NO: 2291 - protein, 383 aa, Homo sapiens
  MISC_FEATURE (22): Xaa equals any of the twenty naturally occurring L-amino acids
GMRWFVDTAERYAWAGRPLAAXCDHNAKVARELGRNQVAQTWTMLRIIYCSPGLVPTANLNHSVGKGGSCGLPLMNSFNLKDMAPGLGSETRLDRSKGDARSDTVLLDSSATLITNEDNEETEGSDVPADYLLGDVEGEEDELYLLDPEHAHPEDPECVLPQEAFPLRHEIVDTPPGPEHLQDKADSPHVSGSEADVASLAPVDSSFSLLSVSHALYDSRLPPDFFGVLVRDMLHFYAEQGDVQMAVSVLIVLGERVRKDIDEQTQEHWYTSYIDLLQRFRLWNVSNEVVKLSTSRAVSCLNQASTTLHVNCSHCKRPMSSRGWVCDRCHRCASMCAVCHHVVKGLFVWCQGCSHGGHLQHIMKWLEGSSHCPAGCGHLCEYS

SEQ ID NO: 2292 - protein, 45 aa, Homo sapiens
PLSALLFNIVLDILARTVRQEKEIKGTQTGKEEVTLSLSAICFYT

SEQ ID NO: 2293 - protein, 187 aa, Homo sapiens
  MISC_FEATURE (6): Xaa equals any of the twenty naturally occurring L-amino acids
IPLTIXKAGTPAGTGPEFPGKMEATTAGVGRLEEEALRRKERLKALREKTGRKDKEDGEPKTKHLREEEEEGEKHRELRLRNYVPEDEDLKKRRVPQAKPVAVEEKVKEQLEAAKPEPVIEEVDLANLAPRKPDWDLKRDVAKKLEKLKKRTQRAIAELIRERLKGQEDSLASAVDAATEQKTCDSD

SEQ ID NO: 2294 - protein, 70 aa, Homo sapiens
KTLNKLGIEGNFLNLIKGIYEEPMVSIILNGEGLDYFPLRSETRQGCLLWPFLFNLYWTVKKGQLGKKIK

SEQ ID NO: 2295 - protein, 427 aa, Homo sapiens
  MISC_FEATURE (145): Xaa equals any of the twenty naturally occurring L-amino acids
  MISC_FEATURE (185): Xaa equals any of the twenty naturally occurring L-amino acids
  MISC_FEATURE (203): Xaa equals any of the twenty naturally occurring L-amino acids
  MISC_FEATURE (208): Xaa equals any of the twenty naturally occurring L-amino acids
  MISC_FEATURE (214): Xaa equals any of the twenty naturally occurring L-amino acids
  MISC_FEATURE (217): Xaa equals any of the twenty naturally occurring L-amino acids
  MISC_FEATURE (390): Xaa equals any of the twenty naturally occurring L-amino acids
  MISC_FEATURE (393): Xaa equals any of the twenty naturally occurring L-amino acids
  MISC_FEATURE (396): Xaa equals any of the twenty naturally occurring L-amino acids
  MISC_FEATURE (397): Xaa equals any of the twenty naturally occurring L-amino acids
TSLQCYVFSTKNWNTPIIFDLKEGTVSLILQAERHFLLVDGSSIYLYSYEGRFISSPKFPGMRTDILNAQTVSLSNDTIAIRDKADEKIIFLFEASTGKPLGDGKFLSHKNEILEIALDQKGLTNDRKIAFIDKNRDLCITSVKXFGKEEQIIKLGTMVHTLAWNDTCNILCGLQDTRFIVWYYXNTVYVDRDILPKTLYERXASEFXKNPHIXSFXGNQVTIRRADGSLVHISITPYPAILHEYVSSSKWEDAVRLCRFVKEQTMWACLAAMAVANRDMTTAEIAYAAIGEIDKVQYINSIKNLPSKESKMAHILLFSGNIQEAEIVLLQAGLVYQAIQININLYNWERALELAVKYKTHVDTVLAYRQKFLETFGKQETNKRYLHYAXGLXIDXXKIKAKIEMEITKEREQSSSSQSSKSIGLKP

SEQ ID NO: 2296 - protein, 260 aa, Homo sapiens
  MISC_FEATURE (2): Xaa equals any of the twenty naturally occurring L-amino acids
  MISC_FEATURE (99): Xaa equals any of the twenty naturally occurring L-amino acids
  MISC_FEATURE (119): Xaa equals any of the twenty naturally occurring L-amino acids
  MISC_FEATURE (140): Xaa equals any of the twenty naturally occurring L-amino acids
  MISC_FEATURE (146): Xaa equals any of the twenty naturally occurring L-amino acids
VXYRRYACSTGSGIPGSTHASGHSMDMRVPAQLLGLLLLWLRGARCDIQMTQSPSSLSASVGDRVTITCRASQSISNYLNWYQQKPGKAPKLLIYAASXLQSGVPSRFSGSGSGTDFTXTISSLQPEDFATYYCQQYDNXPLTFGXGTKVEIKRTVAAPSVFIFPPSDEQLKSGTASVVCLLNNFYPREAKVQWKVDNALQSGNSQESVTEQDSKDSTYSLSSTLTLSKADYEKHKVYACEVTHQGLSSPVTKSFNRGEC

SEQ ID NO: 2297 - protein, 500 aa, Homo sapiens
TRPETPHLAVTTALEASRPAACITSVTMGAVLGVFSLASWVPCLCSGASCLLCSCCPNSKNSTVTRLIYAFILFLGAAVSCIMLTEGMESQLKKIPGFCEGGFKINVADRKVDKDCDVLVGYKAVYRINFALAIFFFVFSLLMLKVKTSKDPRAAVHNGFWFFKIAAIVGIMVGSFYIPGGHFTTAWFFVGMAGAFLFILIQLVLLVDFAHSCNESWVNRMEEGNPRCWYAALLSVTSICYILSVVFAGLLYTYYTRPDGCAENKFFISINLILCFVVSIISIHPKIQEHRPQSGLLQSSVITLYTMYLTWSAMTNEPDRSCNPGLWSIVTHMTAPTLAPGNSTAVVPTPAPPAKSGHFLDAETFIGLTGFVLCLLYSSIRTSNNSQVSKLTLSGSDSVILRDTAASGGSDEEEGQPRRVVDNEKEGVQYSYFLFHFMLCLASLYIMMTLTSWYSPDAEFQSMTSKWSAVWVKISSSWVCLLLYVWTLVAPLVLTNRDFS

SEQ ID NO: 2298 - protein, 223 aa, Homo sapiens
LAFSKPSPTICSMNSNIWQICIQLEGIGQFAYALGKDFCLLLMSALYPVLEKAGDQTLLISQVATSTMMDVCRACGYDSLQHLINQNSDYLVNGISLNLRHLALHPHTPKVLEVMLRNSDANLLPLVADVVQDVLATLDQFYDKRAASFVSVLHALMAALAQWFPDTGNLGHLQEQSLGEEGSHLNQRPAALEKSTTTAEDIEQFLLNYLKEKDVGRWKCLGF

SEQ ID NO: 2299 - protein, 47 aa, Homo sapiens
KDYNQMGFIPGIQGWFNMRKSINVIYCIRKIKERKTTGSPQSMQKRH

SEQ ID NO: 2300 - protein, 476 aa, Homo sapiens
  MISC_FEATURE (377): Xaa equals any of the twenty naturally occurring L-amino acids
  MISC_FEATURE (437): Xaa equals any of the twenty naturally occurring L-amino acids
  MISC_FEATURE (470): Xaa equals any of the twenty naturally occurring L-amino acids
  MISC_FEATURE (474): Xaa equals any of the twenty naturally occurring L-amino acids
VWKTRRKIEMKVHMHTKFCLICLLTFIFHHCNHCHEEHDHGPEALHRQHRGMTELEPSKFSKQAAENEKKYYIEKLFERYGENGRLSFFGLEKLLTNLGLGERKVVEINHEDLGHDHVSHLDILAVQEGKHFHSHNHQHSHNHLNSENQTVTSVSTKRNHKCDPEKETVEVSVKSDDKHMHDHNHRLRHHHRLHHHLDHNNTHHFHNDSITPSERGEPSNEPSTETNKTQEQSDVKLPKGKRKKKGRKSNENSEVITPGFPPNHDQGEQYEHNRVHKPDRVHNPGHSHVHLPERNGHDPGRGHQDLDPDNEGELRHTRKREAPHVKNNAIISLRKDLNEDDHHHECLNVTQLLKYYGHGANSPISTDLFTYLCPALXYQIDSRLCIEHFDKLLVEDINKDKNLVPEDEANIGASAWICGIISITVISLLSLLGVILXPIINQGCFKFLLTFLGALAVGTMSGGRPSSSTXPFSXWT

SEQ ID NO: 2301 - protein, 54 aa, Homo sapiens
KKKRILPNTFYEMSMILISKPVKDITVKLEINILYEYRCKNPQQNTSKFICSNI

SEQ ID NO: 2302 - protein, 73 aa, Homo sapiens
  MISC_FEATURE (61): Xaa equals any of the twenty naturally occurring L-amino acids
HPWYQNMFNWNLWLTTLITGLAGPLLLLLLGLVFGPCILNWFLKFIKQFIASVKLTYLKTXYNSLVVTEESMI

SEQ ID NO: 2303 - protein, 447 aa, Homo sapiens
MRDTESLAKRICKDLENLSQIQNREFGTQKYEQWIVTVQKACMVFQMPDKDEESRICKALFLYTSHLRKYNDALIISEHARMKDALDYLKDFFSNVRAAGFDEIEQDLTQRFEEKLQELESVSRDPSNENPKLEDLCFILQEEYHLNPETITILFVKTRALVDALKNWIEGNPKLSFLKPGILTGRGKTNQNTGMTLPAQKCILDAFKASGDHNILIATSVADEGIDIAQCNLVILYEYVGNVIKMIQTRGRGRARGSKCFLLTSNAGVIEKEQINMYKEKMMNDSILRLQTWDEAVFREKILHIQTHEKFIRDSQEKPKPVPDKENKKLLCRKCKALACYTADVRVIEECHYTVLGDAFKECFVSRPHPKPKQFSSFEKRAKIFCARQNCSHDWGIHVKYKTFEIPVIKIESFVVEDIATGVQTLYSKWKDFHFEKIPFDPAEMSK

SEQ ID NO: 2304 - protein, 80 aa, Homo sapiens
  MISC_FEATURE (2): Xaa equals any of the twenty naturally occurring L-amino acids
  MISC_FEATURE (12): Xaa equals any of the twenty naturally occurring L-amino acids
  MISC_FEATURE (15): Xaa equals any of the twenty naturally occurring L-amino acids
GXLPGGEKELAXPTXGNKSWSSTAVAAALELVDPPGCRNSARAELTPRSEMSKLPTDSSVPQTGAANGDRDVPQAENTRA

SEQ ID NO: 2305 - protein, 252 aa, Homo sapiens
  MISC_FEATURE (187): Xaa equals any of the twenty naturally occurring L-amino acids
  MISC_FEATURE (190): Xaa equals any of the twenty naturally occurring L-amino acids
  MISC_FEATURE (205): Xaa equals any of the twenty naturally occurring L-amino acids
  MISC_FEATURE (208): Xaa equals any of the twenty naturally occurring L-amino acids
  MISC_FEATURE (211): Xaa equals any of the twenty naturally occurring L-amino acids
  MISC_FEATURE (212): Xaa equals any of the twenty naturally occurring L-amino acids
  MISC_FEATURE (215): Xaa equals any of the twenty naturally occurring L-amino acids
  MISC_FEATURE (218): Xaa equals any of the twenty naturally occurring L-amino acids
  MISC_FEATURE (219): Xaa equals any of the twenty naturally occurring L-amino acids
  MISC_FEATURE (223): Xaa equals any of the twenty naturally occurring L-amino acids
  MISC_FEATURE (236): Xaa equals any of the twenty naturally occurring L-amino acids
  MISC_FEATURE (238): Xaa equals any of the twenty naturally occurring L-amino acids
MPGPRVWGKYLWRSPHSKGCPGAMWWLLLWGVLQACPTRGSVLLAQELPQQLTSPGYPEPYGKGQESSTDIKAPEGFAVRLVFQDFDLEPSQDCAGDSVTISFVGSDPSQFCGQQGSPLGRPPGQREFVSSGRSLRLTFRTQPSSENKTAHLHKGFLALYQTVAVNYSQPISEASRGSEAINAPGDXPAXVQNHCQEPYYQAAAXGAXTVXXQGXERXXGWGXGSSVYACLRTASXPXAQNQKTFGFPEPSW

SEQ ID NO: 2306 - protein, 306 aa, Homo sapiens
  MISC_FEATURE (5): Xaa equals any of the twenty naturally occurring L-amino acids
  MISC_FEATURE (6): Xaa equals any of the twenty naturally occurring L-amino acids
  MISC_FEATURE (9): Xaa equals any of the twenty naturally occurring L-amino acids
TRERXXLVXWKTIFTLPMNPSKEFHLSYAEKDLLEREPRGEAHQEVLRRAAKDLPIYTRTMSGAIRYCDRCQLIKPDRCHHCSVCDKCILKMDHHCPWVNNCVGFSNYKFFLLFLAYSLLYCLFIAATDLQYFIKFWTNGLPDTQAKFHIMFLFFAAAMFSVSLSSLFGYHCWLVSKNKSTLEAFRSPVFRHGTDKNGFSLGFSKNMRQVFGDEKKYWLLPIFSSLGDGCSFPTCLVNQDPEQASTPAGLNSTAKNLENHQFPAKPLRESQSHLLTDSQSWTESSINPGKCKAGMSNPALTMENET

SEQ ID NO: 2307 - protein, 178 aa, Homo sapiens
MVTLKARMTNYGLPRYRWLTHAWNFFQREFKCCGVVYFTDWLEMTEMDWPPDSCCVREFPGCSKQAHQEDLSDLYQEGCGKKMYSFLRGTKQLQVLRFLGISIGVTQILAMILTITLLWALYYDRREPGTDQMMSLKNDNSQHLSCPSVELLKPSLSRIFEHTSMANSFNTHFEMEEL

SEQ ID NO: 2308 - protein, 61 aa, Homo sapiens
QSLLSAQKKKKKKKKGGRSRGSKLTYACMRRHSSSIVSPKFNSLAVVLQRRDWENPGVTQL

SEQ ID NO: 2309 - protein, 36 aa, Homo sapiens
YKFLFETESHSVAQAGVRWCNLCLLKPLPPKFKQFS

SEQ ID NO: 2310 - protein, 517 aa, Homo sapiens
  MISC_FEATURE (502): Xaa equals any of the twenty naturally occurring L-amino acids
AAARTRTRCPRGPPALSPAPLSGPRPVRRHRRRRQSRHADPARRSSPAAAAAAGGARLGAAVPGRPLGAFGCRLPRPLRAGALPAAAGALRGRPGPGRVRLLRGVRRARGRRVRPAGGPVRRGAAVRGALRGASLGHGAAARAGRPLCVRHSEPVCGSDANTYANLCQLRAASRRSERLHRPPVIVLQRGACGQGQEDPNSLRHKYNFIADVVEKIAPAVVHIELFRKLPFSKREVPVASGSGFIVSEDGLIVTNAHVVTNKHRVKVELKNGATYEAKIKDVDEKADIALIKIDHQGKLPVLLLGRSSELRPGEFVVAIGSPFSLQNTVTTGIVSTTQRGGKELGLRNSDMDYIQTDAIINYGNSGGPLVNLDGEVIGINTLKVTAGISFAIPSDKIKKFLTESHDRQAKGKAITKKKYIGIRMMSLTSSKAKELKDRHRDFPDVISGAYIIEVIPDTPAEAGGLKENDVIISINGQSVVSANDVSDVIKRESTLNMVVRRXNEDIMITVIPEEIDP

SEQ ID NO: 2311 - protein, 459 aa, Homo sapiens
  MISC_FEATURE (221): Xaa equals any of the twenty naturally occurring L-amino acids
  MISC_FEATURE (262): Xaa equals any of the twenty naturally occurring L-amino acids
  MISC_FEATURE (382): Xaa equals any of the twenty naturally occurring L-amino acids
  MISC_FEATURE (383): Xaa equals any of the twenty naturally occurring L-amino acids
  MISC_FEATURE (390): Xaa equals any of the twenty naturally occurring L-amino acids
  MISC_FEATURE (402): Xaa equals any of the twenty naturally occurring L-amino acids
AVAAEWAAGSCPASCDRAGPEDSVEMPVTHRKSDASDMNSDTSPSCRLRAFSRGGSLESRSSSSRSRSFTLDDESLKYLTHEEKDVLLFFEETIDSLDEDFEEPVLCDGGVCCLCSPSLEESTSSPSEPEDVIDLVQPAPGAGEAEGLPEGTQAAGPAPAGKEHRKQDAETPPPPDPPAPETLLAPPPLPSTPDPPRRELRAPSPPVEHPRLLRSVPTPLXMAQKISERMAGNEALSPTSPFREGRPGEWRTPAARGPRSGXLARGPATRRSPRHPASPATSSSPTARPGSPAGPCPGRPSACRSAGRRCWPPSTDTPAPSPPRGTPARGPQGAAPPRSGWRVAGACRAPLRVSGQGVRLRGARRWPTASKCARGPEERTQXXRARWEVXLLPPWPGPAQHXGPSELPRAPAAQRRPGLAPRRLPAPAPGHHRAVRGPRLLGGGAQGGLRKLGLLRESS

SEQ ID NO: 2312 - protein, 298 aa, Homo sapiens
ILKNTSRLKNIYELLLLLMYIGFNILLYRIMMLSVLRNTKTPVKFWLLKNYLSPTFKEVIPHMAKEYGFRYELVQYRWPRWLRQQTERQRIIWGYKILFLDVLFPLAVDKIIFVDADQIVRHDLKELRDFDLDGAPYGYTPFCDSRREMDGYRFWKTGYWASHLLRRKYHISALYVVDLKKFRRIGAGDRLRSQYQALSQDPNSLSNLDQDLPNNMIYQVAIKSLPQDWLWCETWCDDESKQRAKTIDLCNNPKTKESKLKAAARIVPEWVEYDAEIRQLLDHLENKKQDTILTHDEL

SEQ ID NO: 2313 - protein, 30 aa, Homo sapiens
TLMIIARLFTIAKIGNQPKYPSTDEEIKIM

SEQ ID NO: 2314 - protein, 115 aa, Homo sapiens
VLPTTPSHHLLSQPPMSQAREAVIAAAFAKLDRSGDGVVTVDDLRGVYSGRAHPKVRSGEWTEDEVLRRFLDNFDSSEKDGQVTLAEFQDYYSGVSASMNTDEEFVAMMTSAWQL

SEQ ID NO: 2315 - protein, 553 aa, Homo sapiens
  MISC_FEATURE (69): Xaa equals any of the twenty naturally occurring L-amino acids
  MISC_FEATURE (117): Xaa equals any of the twenty naturally occurring L-amino acids
  MISC_FEATURE (127): Xaa equals any of the twenty naturally occurring L-amino acids
  MISC_FEATURE (346): Xaa equals any of the twenty naturally occurring L-amino acids
  MISC_FEATURE (387): Xaa equals any of the twenty naturally occurring L-amino acids
STPGRYRSGIPGSTHASGITIGGHRSDVRTLSFSSDNIAVLSAAADSIKIWNRSTLQCIRTMTCEYALXSFFVPGDRQVVIGTKTGKLQLYDLASGNLLETIDAHDGALWSMSLSPXQRGFVTGGAXKSVKFWDFELVKDENSTQKRLSVKQTRTLQLDEDVLCVSYSPNQKLLAVSLLDCTVKIFYVDTLKFFLSLYGHKLPVICMDISHDGALIATGSADRNVKIWGLDFGDCHKSLFAHDDSVMYLQFVPKSHLFFTAGKDHKIKQWDADKFEHIQTLEGHHQEIWCLAVSPSGDYVVSSSHDKSLRLWERTREPLILEEEREMEREAEYEESVAKEDQPAVXGETQGDSYFTGKKTIETVKAAERIMEAIELYREETAKMKEXKAICKAAGKEVPLPSNPILMAYGSISPSAYVLEIFKGIKSSELEESLLVLPFSYVPDILKLFNEFIQLGSDVELICRCLFFLLRIHFGQITSNQMLVPVIEKLRETTISKVSQVRDVIGFNMAGLDYLKRECEAKSEVMFFADATSHLEEKKRKRKKREKLILTLT

SEQ ID NO: 2316 - protein, 126 aa, Homo sapiens
  MISC_FEATURE (3): Xaa equals any of the twenty naturally occurring L-amino acids
  MISC_FEATURE (17): Xaa equals any of the twenty naturally occurring L-amino acids
PPXFFFFFFFFFFFFFXFFFFFFFFFFFFFFDSFSTLLAWSSSLPAPGAGRWSLGTVSRAEVRRVRPLAMAAWLGQPGQGKKRCKSPNAGTSGVAGTQPGAVGGQGAMLLSWRQVGRVAAPPPSSH

SEQ ID NO: 2317 - protein, 422 aa, Homo sapiens
IRGHQLLEEVTQGDMSAADTFLSDLPRDDIYVSDVEDDGDDTSLDSDLDPEELAGVRGHQGLRDQKRMRLTEVQDDKEEEEEENPLLVPLEEKAVLQEEQANLWFSKGSFAGIEDDADEALEISQAQLLFENRRKGRQQQQKQQLPQTPPSCLKTEIMSPLYQDEAPKGTEASSGTEAATGLEGEEKDGISDSDSSTSSEEEESWEPLRGKKRSRGPKSDDDGFEIVPIEDPAKHRILDPEGLALGAVIASSKKAKRDLIDNSFNRYTFNEDEGELPEWFVQEEKQHRIRQLPVGKKEVEHYRKRWREINARPIKKVAEAKARKKRRMLKRLEQTRKKAEAVVNTVDISEREKVAQLRSLYKKAGLGKEKRHVTYVVAKKGVGRKVRRPAGVRGHFKVVDSRMKKDQRAQQRKEQKKKHKRK

SEQ ID NO: 2318 - protein, 331 aa, Homo sapiens
AELNLSYNPISTIEGSMLHELLRLQEIQLVGGQLAVVEPYAFRGLNYLRVLNVSGNQLTTLEESVFHSVGNLETLILDSNPLACDCRLLWVFRRRWRLNFNRQQPTCATPEFVQGKEFKDFPDVLLPNYFTCRRARIRDRKAQQVFVDEGHTVQFVCRADGDPPPAILWLSPRKHLVSAKSNGRLTVFPDGTLEVRYAQVQDNGTYLCIAANAGGNDSMPAHLHVRSYSPDWPHQPNKTFAFISNQPGEGEANSTRATVPFPFDIKTLIIATTMGFISFLGVVLFCLVLLFLWSRGKGNTKHNIEIEYVPRKSDAGISSADAPRKFNMKMI

SEQ ID NO: 2319 - protein, 226 aa, Homo sapiens
RRASGPGGRPSFPRDNFTKMSSDRQRSDDESPSTSSGSSDADQRDPAAPEPEEQEERKPSATQQKKNTKLSSKTTAKLSTSAKRIQKELAEITLDPPPNCSAGPKGDNIYEWRSTILGPPGSVYEGGVFFLDITFSSDYPFKPPKVTFRTRIYHCNINSQGVICLDILKDNWSPALTISKVLLSICSLLTDCNPADPLVGSIATQYLTNRAEHDRIARQWTKRYAT

SEQ ID NO: 2320 - protein, 729 aa, Homo sapiens
SCQNLNHLKAGLQAFFQVQECNKSSSKDNIRGKHVRHYYIAAEEIIWNYAPSGIDIFTKENLTAPGSDSAVFFEQGTTRIGGSYKKLVYREYTDASFTNRKERGPEEEHLGILGPVIWAEVGDTIRVTFHNKGAYPLSIEPIGVRFNKNNEGTYYSPNYNPQSRSVPPSASHVAPTETFTYEWTVPKEVGPTNADPVCLAKMYYSAVDPTKDIFTGLIGPMKICKKGSLHANGRQKDVDKEFYLFPTVFDENESLLLEDNIRMFTTAPDQVDKEDEDFQESNKMHSMNGFMYGNQPGLTMCKGDSVVWYLFSAGNEADVHGIYFSGNTYLWRGERRDTANLFPQTSLTLHMWPDTEGTFNVECLTTDHYTGGMKQKYTVNQCRRQSEDSTFYLGERTYYIAAVEVEWDYSPQREWEKELHHLQEQNVSNAFLDKGEFYIGSKYKKVVYRQYTDSTFRVPVERKAEEEHLGILGPQLHADVGDKVKIIFKNMATRPYSIHAHGVQTESSTVTPTLPGETLTYVWKIPERSGAGTEDSACIPWAYYSTVDQVKDLYSGLIGPLIVCRRPYLKVFNPRRKLEFALLFLVFDENESWYLDDNIKTYSDHPEKVNKDDEEFIESNKMHAINGRMFGNLQGLTMHVGDEVNWYLMGMGNEIDLHTVHFHGHSFQYKHRGVYSSDVFDIFPGTYQTLEMFPRTPGIWLLHCHVTDHIHAGMETTYTVLQNEDTKSG

SEQ ID NO: 2321 - protein, 82 aa, Homo sapiens
GAAAPVRSIWFQVCGPSRTNPSMMIDDLLTPCSPGDPGAMEMTWMDVPGDKLLEPVVCMVSDLTGEGRGLHRAQKIEGLGPE

SEQ ID NO: 2322 - protein, 264 aa, Homo sapiens
  MISC_FEATURE (6): Xaa equals any of the twenty naturally occurring L-amino acids
  MISC_FEATURE (228): Xaa equals any of the twenty naturally occurring L-amino acids
  MISC_FEATURE (239): Xaa equals any of the twenty naturally occurring L-amino acids
  MISC_FEATURE (254): Xaa equals any of the twenty naturally occurring L-amino acids
  MISC_FEATURE (260): Xaa equals any of the twenty naturally occurring L-amino acids
  MISC_FEATURE (264): Xaa equals any of the twenty naturally occurring L-amino acids
RWQGLXESVCLIMDSELMHSIVGSYHKPPERVFVPSFTQNEPSQNCHPANLEVTSPKILHSPNSQALILALKTLQEKIHRLELERTQAEDNLNILSREAAQYKKALENETNERNLAHQELIKQKKDISIQLSSAQSRCTLLEKQLEYTKRMVLNVEREKNMILEQQAQLQREKEQDQMKLYAKLEKLDVLEKECFRLTTTQKTAEDKIKHLEEKLKEEEHQRKLFQDXASELQTGLEIXKIIMASVSNLSTSRXRRNLQXNLMX

SEQ ID NO: 2323 - protein, 368 aa, Homo sapiens
  MISC_FEATURE (39): Xaa equals any of the twenty naturally occurring L-amino acids
  MISC_FEATURE (91): Xaa equals any of the twenty naturally occurring L-amino acids
PGRVRPGLFRVRPEAAGAAQVVSLHFLPGRVRPAPLRLXPASSPPPLSRRHHAAACVHPETAPQNQPPNGGHRALRRDSPVPGGRTQTGKXFIHNPHTRNQHVSASRVFQSPLESDVSLLNINQAVSCLTAGVLNPELGYDALLVGTQTNLLAYDVYNNSDLFYREVADGANAIVLGTLGDISSPLAIIGGNCALQGFNHEGSDLFWTVTGDNVNSLALCDFDGDGKKELLVGSEDFDIRVFKEDEIVAEMTETEIVTSLCPMYGSRFGYALSNGTVGVYDKTSRYWRIKSKNHAMSIHVFDLNSDGVNELITGWSNGKVDARSDRTGEVIFKDNFSSAIAGVVEGDYRMDGHIQLICCSVDGESKLG

SEQ ID NO: 2324 - protein, 331 aa, Homo sapiens
  MISC_FEATURE (231): Xaa equals any of the twenty naturally occurring L-amino acids
  MISC_FEATURE (263): Xaa equals any of the twenty naturally occurring L-amino acids
  MISC_FEATURE (273): Xaa equals any of the twenty naturally occurring L-amino acids
  MISC_FEATURE (275): Xaa equals any of the twenty naturally occurring L-amino acids
  MISC_FEATURE (327): Xaa equals any of the twenty naturally occurring L-amino acids
PAPPGAGGGCGRRKPDQPQAVDVGEGRAQGAIMGFPQRQPGLSGLLLLVWALAWPLPCMSLELIPYTPQITAWDLEGKVTATTFSLEQPRCVLDGLAGVASTIWLVVAFSNASRDFQNPQTRAEIPAFPRLLTEGHYMTLPLSLDQLPCQDPAGGGRDVPLLRVGNDPGCLADLLQPPYCNSPLPSPGPYRVKFLLMDARGSPQAETRWSDPIALHQGKSPASIDTWPGRXSGGMIVITSILSSLASLLLLAFLAASTARFSXLWWPEEAPEXLXIGSFMGKRYMTHHIPPSEAATLPVGCEPGLDPSPTSAPNLALVAGACVAVAXVGAR

SEQ ID NO: 2325 - protein, 97 aa, Homo sapiens
DPRVRMAAGSVGSLRPAFALRLLLAAVLQAVSAFGAEFSSEACRELGFSSNLLCSSCDLLGQFNLLQLDPDCRGCCQEEAQFETKKLYAGAILEVCG

SEQ ID NO: 2326 - protein, 169 aa, Homo sapiens
  MISC_FEATURE (27): Xaa equals any of the twenty naturally occurring L-amino acids
REQKLELHRGGGRSRTSGSPGLQEFGXRAPGPSCLSCTHSDCCVCFLQENPFKERIVAAFSEDGEGNLTFNDFVDMFSVLCESAPRELKANYAFKIYDFNTDNFICKEDLELTLARLTKSELDEEEVVLVCDKVIEEADLDGDGKLGFADFEDMIAKAPDFLSTFHIRI

SEQ ID NO: 2327 - protein, 183 aa, Homo sapiens
  MISC_FEATURE (1): Xaa equals any of the twenty naturally occurring L-amino acids
  MISC_FEATURE (177): Xaa equals any of the twenty naturally occurring L-amino acids
XVRLQAPVRNSRVDPRVRRGKGEGYRGTANTTTAGVPCQRWDAQIPHQHRFTPEKYACKDLRENFCRNPDGSEAPWCFTLRPGMRAAFCYQIRRCTDDVRPQDCYHGAGEQYRGTVSKTRKGVQCQRWSAETPHKPQFTFTSEPHAQLEENFCRNPDGDSHGPWCYTMDPRTPFDYXALRRSL

SEQ ID NO: 2328 - protein, 394 aa, Homo sapiens
SDYYRESWYACRYRSGIPGSTHASAPSTRSGDPLVAVLPTRTRVPQASRCPAGSSCPTPGARPPASPGPLPRPSSRRARSMAPPQVLAFGLLLAAATATFAAAQEECVCENYKLAVNCFVNNNRQCQCTSVGAQNTVICSKLAAKCLVMKAEMNGSKLGRRAKPEGALQNNDGLYDPDCDESGLFKAKQCNGTSMCWCVNTAGVRRTDKDTEITCSERVRTYWIIIELKHKAREKPYDSKSLRTALQKEITTRYQLDPKFITSILYENNVITIDLVQNSSQKTQNDVDIADVAYYFEKDVKGESLFHSKKMDLTVNGEQLDLDPGQTLIYYVDEKAPEFSMQGLKAGVIAVIVVVVIAVVAGIVVLVISRKKRMAKYEKAEIKEMGEMHRELNA

SEQ ID NO: 2329 - protein, 529 aa, Homo sapiens
  MISC_FEATURE (144): Xaa equals any of the twenty naturally occurring L-amino acids
  MISC_FEATURE (149): Xaa equals any of the twenty naturally occurring L-amino acids
  MISC_FEATURE (250): Xaa equals any of the twenty naturally occurring L-amino acids
  MISC_FEATURE (251): Xaa equals any of the twenty naturally occurring L-amino acids
  MISC_FEATURE (330): Xaa equals any of the twenty naturally occurring L-amino acids
  MISC_FEATURE (345): Xaa equals any of the twenty naturally occurring L-amino acids
  MISC_FEATURE (517): Xaa equals any of the twenty naturally occurring L-amino acids
YRIPPAGPVRNSRVDPRVRKEELQGLEYLRPSQWVGPGAGVPGKQASLWNSEQSCCLSHGPLESIRQRTAKGCNTPKGQLRTRTMWWALLALPFLLPTALRLCLAGPPPERGPLFWLTRQDSRESGAANATVSPCEGLPSAGAXTLTLXNRSLERLPNCLPPALRSLDASHNLLRALSAPELGALPRLQALTLRHNRIAELRWGPGGPAALHTLDLSYNQLATLPPCAGPALPGLRSLALAGNPLQALQXXAFACLPALRLLNLSGTALGRDLGAGIADGAFAGAGGALEVLDLSGTFLERVRSGWIRDLPKLTSLHLRKMPRLRILEAXVFKMTPNLQQLDCQXSSALTSVHTQLFQDTPRLQVLLFQNCNLSSFPPWSLHSSQVLSISLFGNPLICSCELSWLLRDAKRTVLSRAADTVCVPASGSRDTFSAPLSLSQLPTVCHLDQSTTLHSSSPQAVPFTHQPSTQGLTTPWSTAPSTRPVEAEQSVTKPLSFPTDSATQTAWSHSGIKVGTXRSTAIPTADSST

SEQ ID NO: 2330 - protein, 448 aa, Homo sapiens
  MISC_FEATURE (306): Xaa equals any of the twenty naturally occurring L-amino acids
  MISC_FEATURE (313): Xaa equals any of the twenty naturally occurring L-amino acids
VKVRLIEDRVLPSQCYQPLMELLMESVQGPAEEDTASPLALLEELTLGDCRQDLATKLVKLFLGRGLAGRFLDYLTRREVARTMDPNTLFRSNSLASKSMEQFMKLVGMPYLHEVLKPVISRVFEEKKYMELDPCKMDLGPHPEDLLQRRTLGGADAGDQPGAADGLLGPIVDAIVGSVGRCPPAMRLAFKQLHRRVEERFPQAEHQDVKYLAISGFLFLRFFAPAILTPKLFDLRDQHADPQTSRSLLLLAKMCHSIPVSHIRAVERVDEGAFQLPHVMQVVTQDGTGALHTTYLQCKNVNELNXWLSALRXASAPNPNKLAACHPGAFRSARWTCCLQAERSAAGCSRTHSAVTLGDWSDPLDPDAEAQTVYRQLLLGRDQLRLKLLEDSNMDTTLEADTGACPEVLARQRAATARLLEVLADLDRAHEEFQQQERGKAALGPLGP

SEQ ID NO: 2331 - protein, 425 aa, Homo sapiens
  MISC_FEATURE (34): Xaa equals any of the twenty naturally occurring L-amino acids
TTHPPTTATTRRTTTRRPTTTVRTTTRTTTTTTXKPTTPIPTCPPGTLERHDDDGNLIMSSNGIPECYAEEDEFSGLETDTAVPTEEAYVIYDEDYEFETSRPPTTTEPSTTATTPRVIPEEGAISSFPEEEFDLAGRKRFVAPYVTYLNKDPSAPCSLTDALDHFQVDSLDEIIPNDLKKSDLPPQHAPRNITVVAVEGCHSFVIVDWDKATPGDVVTGYLVYSASYEDFIRNKWSTQASSVTHLPIENLKPNTRYYFKVQAQNPHGYGPISPSVSFVTESDNPLLVVRPPGGEPIWIPFAFKHDPSYTDCHGRQYVKRTWYRKFVGVVLCNSLRYKIYLSDNLKDTFYSIGDSWGRGEDHCQFVDSHLDGRTGPQSYVEALPTIQGYYRQYRQEPVRFGNIGFGTPYYYVGWYECGVSIPGKW

SEQ ID NO: 2332 - protein, 198 aa, Homo sapiens
DRVWNKSDSDESVPELEEQDSTQATTQQAQLAAAAEIDEEPVSKAKQSRSEKKARKAMSKLGLRQVTGVTRVTIRKSKNILFVITKPDVYKSPASDTYIVFGEAKIEDLSQQAQLAAAEKFKVQGEAVSNIQENTQTPTVQEESEEEEVDETGVEVKDIELVMSQANVSRAKAVRALKNNSNDIVNAIMELSVQAFVP

SEQ ID NO: 2333 - protein, 65 aa, Homo sapiens
  MISC_FEATURE (2): Xaa equals any of the twenty naturally occurring L-amino acids
  MISC_FEATURE (7): Xaa equals any of the twenty naturally occurring L-amino acids
  MISC_FEATURE (8): Xaa equals any of the twenty naturally occurring L-amino acids
  MISC_FEATURE (14): Xaa equals any of the twenty naturally occurring L-amino acids
  MISC_FEATURE (19): Xaa equals any of the twenty naturally occurring L-amino acids
  MISC_FEATURE (27): Xaa equals any of the twenty naturally occurring L-amino acids
  MISC_FEATURE (34): Xaa equals any of the twenty naturally occurring L-amino acids
QXPKEWXXRPPPPXPANFXYSSRAGFXVLPRLVXNSLSSGNLPAMASQSAGITGVSHCAQPCLRS

SEQ ID NO: 2334 - protein, 100 aa, Homo sapiens
RIWDRNRERSPTAPRARGRPGKEWDRSRDDRNRERAGPERDRTVRAESGRDKARDRERATQDRSKTKNAGTRTRGSRLDAGTARRPRRPGRQRPFLKPRS

SEQ ID NO: 2335 - protein, 41 aa, Homo sapiens
  MISC_FEATURE (26): Xaa equals any of the twenty naturally occurring L-amino acids
GAQGTAGLFSQGGKGLPAAPARGDPXPPRSTSGGVSARGSQ

SEQ ID NO: 2336 - protein, 158 aa, Homo sapiens
WQNVSFQHDVSHFIFFCMNQKNALQNHVPLITVFSGFYRIVIARTTLLLFHNIFFLFLSFEFLTGLQSMPGEYVARGGPMGVSMGQPSYTQPQMPPHPAQLRHGPPMHTYIPGHPHHPTVMMHGGPPHPGMPMSASSPTVLNTGDPTMSGQVMDIHAQ

SEQ ID NO: 2337 - protein, 349 aa, Homo sapiens
  MISC_FEATURE (6): Xaa equals any of the twenty naturally occurring L-amino acids
  MISC_FEATURE (13): Xaa equals any of the twenty naturally occurring L-amino acids
  MISC_FEATURE (67): Xaa equals any of the twenty naturally occurring L-amino acids
  MISC_FEATURE (74): Xaa equals any of the twenty naturally occurring L-amino acids
  MISC_FEATURE (78): Xaa equals any of the twenty naturally occurring L-amino acids
  MISC_FEATURE (80): Xaa equals any of the twenty naturally occurring L-amino acids
DKIPNXVHNKFMXQLHDLKVKGPRSPILNLESVAFRGSFWHNVLIFLFLNAKTKVRGLIEIISNAAXYENIPIXHHEXNXLRQLAQKVPHKLNNPKFNDPHVKTNLLLQAHLSRMQLSAELQSDTEEILSKAIRLIQACVDVLSSNGWLSPALAAMELAQMVTQAMWSKDSYLKQLPHFTSEHIKRCTDKGVESVFDIMEMEDEERNALLQLTDSQIADVARFCNRYPNIELSYEVVDKDSIRSGGPVVVLVQLEREEEVTGPVIAPLFPQKREEGWWVVIGDAKSNSLISIKRLTLQQKAKVKLDFVAPATGAHNYTLYFMSDAYMGCDQEYKFSVDVKEAETDSDSD

SEQ ID NO: 2338 - protein, 534 aa, Homo sapiens
VRRRPAGTRAATRGSCSMAVSRKDWSALSSLARQRTLEDEEEQERERRRRHRNLSSTTDDEAPRLSQNGDRQASASERLPSVEEAEVPKPLPPASKDEDEDIQSILRTRQERRQRRQVVEAAQAPIQERLEAEEGRNSLSPVQATQKPLVSKKELEIPPRRRLSREQRGPWALEEESLVGREPEERKKGVPEKSPVLEKSSMPKKTAPEKSLVSDKTSISEKVLASEKTSLSEKIAVSEKRNSSEKKSVLEKTSVSEKSLAPGMALGSGRRLVSEKASIFEKALASEKSPTADAKPAPKRATASEQPLAQEPPASGGSPATTKEQRGRALPGKNLPSLAKQGASDPPTVASRLPPVTLQVKIPSKEEEADMSSPTQRTYSSSLKRSSPRTISFRMKPKKENSETTLTRSASMKLPDNTVKLGEKLERYHTAIRRSESVKSRGLPCTELFVAPVGVASKRHLFEKELAGQSRAEPASSRKENLRLSGVVTSRLNLWISRTQESGDQDPQEAQKASSATERTQWGQKSDSSLDAEV

SEQ ID NO: 2339 - protein, 115 aa, Homo sapiens
QLLSSNSAAGQLAFDDFQESCAMMWQKYAGSRRSMPLGARILFHGVFYAGGFAIVYYLIQKFHSRALYYKLAVEQLQSHPEAQEALGPPLNIHYLKLIDRENFVDIVDAQVKIPV

SEQ ID NO: 2340 - protein, 268 aa, Homo sapiens
VMFSFEAGRRCPSGPGTFTFQTAQGNDIFQAVETAIHRQKAQGKAGQGHDVLRADSHEGEVAEGKLPSPPGPQELLDSPPALYAEPLDSLRIAPCPSQDSLYSDPLDSTSAQAGEGVQRKKPLYWDLYEHAQQQLLKAKLTDPKEDPIYDEPEGLAPVPPQGLYDLPREPKDAWWCQARVKEEGYELPYNPATDDYAVPPPRSTKPLLAPKPQGPAFPEPGTATGSGIKSHNSALYSQVQKSGASGSWDCGLSRVGTDKTGVKSEGST

SEQ ID NO: 2341 - protein, 202 aa, Homo sapiens
  MISC_FEATURE (21): Xaa equals any of the twenty naturally occurring L-amino acids
SSCFLMASPWRSLCQPGQCRXPVRQQHTHPTFHALRSLDQQMYLCYSQPGIPTLPTPVEITVICAAPGADGAWWRAQVVASYEETNEVEIRYVDYGGYKRVKVDVLRQIRSDFVTLPFQGAEVLLDSVMPLSDDDQFSPEADAAMSEMTGNTALLAQVTSYSPTGLPLIQLWSVVGDEVVLINRSLVERGLAQWVDSYYTSL

SEQ ID NO: 2342 - protein, 76 aa, Homo sapiens
ILKIKEVLSGQEWWLMPVIPALWEAEAGRSLEARSLRPAWPTWQSPISTKNTKLSWAWWCTLVIPATWEAESMRIA

SEQ ID NO: 2343 - protein, 259 aa, Homo sapiens
ALSQLGAGPFPHCPSTFRSCMVEESGTLESQLEATKRKHQEIRAMRSQLKKIEDLGAAMEEALILDNKYTEHSTVGLAQQWDQLDQLGMRMQHNLEQQIQARNTTGVTEEALKEFSMMFKHFDKDKSGRLNHQEFKSCLRSLGYDLPMVEEGEPDPEFEAILDTVDPNRDGHVSLQEYMAFMISRETENVKSSEEIESAFRALSSEGKPYVTKEELYQNLTREQADYCVSHMKPYVDGKGRELPTAFDYVEFTRSLFVN

SEQ ID NO: 2344 - protein, 660 aa, Homo sapiens
  MISC_FEATURE (309): Xaa equals any of the twenty naturally occurring L-amino acids
  MISC_FEATURE (316): Xaa equals any of the twenty naturally occurring L-amino acids
  MISC_FEATURE (366): Xaa equals any of the twenty naturally occurring L-amino acids
  MISC_FEATURE (463): Xaa equals any of the twenty naturally occurring L-amino acids
CFCFLLPLLPSRWEPSRREGGGEMIAELVSSALGLALYLNTLSADFCYDDSRAIKTNQDLLPETPWTHIFYNDFWGTLLTHSGSHKSYRPLCTLSFRLNHAIGGLNPWSYHLVNVLLHAAVTGLFTSFSKILLGDGYWTFMAGLMFASHPIHTEAVAGIVGRADVGASLFFLLSLLCYIKHCSTRGYSARTWGWFLGSGLCAGCSMLWKEQGVTVLAVSAVYDVFVFHRLKIKQILPTIYKRKNLSLFLSISLLIFWGSSLLGARLYWMGNKPPSFSNSDNPAADSDSLLTRTLTFFYLPTKNLWLLLXPDTLSFXWSMDAVPLLKTVCDWRNLHTVAFYTGLLLLAYYGLKSPSVDRECNGKTVXNGKQNANGHSCLSDVEYQNSETKSSFASKVENGIKNDVSQRTQLPSTENIVVLSLSLLIIPFVPATNLFFYVGFVIAERVLYIPSMGFCLLITVGAXALYVKVQKRFLKSLIFYATATLIVFYGLKTAIRNGDWQNEEMLYRSGIKVNPAKAWGNLGNVLKSQSKISEAESAYRNALYYRSNMADMLYNLGLLLQENSRFAEALHYYKLAIGSRPTLASAYLNTGIILMNQGRTEEARRTFLKCSEIPDENLKDPHAHKSSVTSCLYNLGKLYHEQGHYEVWPMPLCPFPSPLF

SEQ ID NO: 2345 - protein, 168 aa, Homo sapiens
  MISC_FEATURE (37): Xaa equals any of the twenty naturally occurring L-amino acids
  MISC_FEATURE (153): Xaa equals any of the twenty naturally occurring L-amino acids
ARAADFAARKHRQQRRKDPEGTPYINHPIGGRVGRGXRLRHLGGVARILTHEAGITDIVVLQAALLHDTVEDTDTTLDEVELHFGAQVRRLVEEVTDDKTLPKLERKRLQVEQAPHSSPGAKLVKLADKLYNLRDLNRCTPEGTLSYGPVREXGGGCRLLKTHVGQFP

SEQ ID NO: 2346 - protein, 300 aa, Homo sapiens
  MISC_FEATURE (31): Xaa equals any of the twenty naturally occurring L-amino acids
  MISC_FEATURE (77): Xaa equals any of the twenty naturally occurring L-amino acids
  MISC_FEATURE (81): Xaa equals any of the twenty naturally occurring L-amino acids
  MISC_FEATURE (85): Xaa equals any of the twenty naturally occurring L-amino acids
WSPDGKYIVTGGEDDLVTVWSFVDCRVIARXHGHKSWVSVVAFDPYTTSVEEGDPMEFSGSDEDFQDLLHFGRDRAXSTQXRLSXRNSTDSRPVSVTYRFGSVGQDTQLCLWDLTEDILFPHQPLSRARTHTNVMNATSPPAGSNGNSVTTPGNSVPPPLPRSNSLPHSAVSNAGSKSSVMDGAIASGVSKFATLSLHDRKERHHEKDHKRNHSMGHISSKSSDKLNLVTKTKTDPAKTLGTPLCPRMEDVPLLEPLICKKIAHERLTVLIFLEDCIVTACQEGFICTWGRPGKVVSFNP

SEQ ID NO: 2347 - protein, 337 aa, Homo sapiens
TRGTPASPPEADGPGVLPGRLMYEQYRMDSGNTRDMTLIHGYFGSTQGLSDELAKQLWMVLQRSLVTVRRDPTLLVSVVRIIEREEKIDRRILDRKKQTGFVPPGRPKNWKEKMFTILERTVTTRIEGTQADTRESDKMWLVRHLEIIRKYVLDDLIVAKNLMVQCFPPHYEIFKNLLNMYHQALSTRMQDLASEDLEANEIVSLLTWVLNTYTSTEMMRNVELAPEVDVGTLEPLLSPHVVSELLDTYMSTLTSNIIAWLRKALETDKKDWVKETEPEADQDGYYQTTLPAIVFQMFEQNLQVAAQISEDLKTKVLVLCLQQMNSFLSRYVFLPVC

SEQ ID NO: 2348 - protein, 135 aa, Homo sapiens
  MISC_FEATURE (41): Xaa equals any of the twenty naturally occurring L-amino acids
  MISC_FEATURE (44): Xaa equals any of the twenty naturally occurring L-amino acids
  MISC_FEATURE (59): Xaa equals any of the twenty naturally occurring L-amino acids
ADAWDGRVGGRVGADGGAGRRAWAGVGGAPGAGGGPAEAGXAAXEGAEHRGDGAVRAGXGGGRRYRPRRVQVSGAGGGRMLARHPRPLLSGYARPAGREEPPLPPPPSLSGLQGSGRAGRRGLNGPRVCSRQDPG

SEQ ID NO: 2349 - protein, 47 aa, Homo sapiens
  MISC_FEATURE (1): Xaa equals any of the twenty naturally occurring L-amino acids
XFSFPLSSLLCSGCSHRAVNGFDPAPPPPGLGSSRPSSAPGMLPLSV

SEQ ID NO: 2350 - protein, 76 aa, Homo sapiens
NSTEMKKIECACNFLMDKDAQGYIDLSDLDLTSCHFKGDVISKVSFLSSNLQHVTFECKEIGDCNFTTAIVDNVIF

SEQ ID NO: 2351 - protein, 205 aa, Homo sapiens
AEPRSVTRSRRAVSRLSARPGKVSAVMAFLASGPYLTHQQKVLRLYKRALRHLESWCVQRDKYRYFACLMRARFEEHKNEKDMAKATQLLKEAEEEFWYRQHPQPYIFPDSPGGTSYERYDCYKVPEWCLDDWHPSEKAMYPDYFAKREQWKKLRRESWEREVKQLQEETPPGGPLTEALPPARKEGDLPPLWWYIVTRPRERPM

SEQ ID NO: 2352 - protein, 43 aa, Homo sapiens
  MISC_FEATURE (3): Xaa equals any of the twenty naturally occurring L-amino acids
TAXIRHERSPAFRGPDRARAAVSRQPDKEFSFMDEEEEDEIRV

SEQ ID NO: 2353 - protein, 160 aa, Homo sapiens
  MISC_FEATURE (16): Xaa equals any of the twenty naturally occurring L-amino acids
  MISC_FEATURE (96): Xaa equals any of the twenty naturally occurring L-amino acids
  MISC_FEATURE (101): Xaa equals any of the twenty naturally occurring L-amino acids
  MISC_FEATURE (110): Xaa equals any of the twenty naturally occurring L-amino acids
HQISSRCQKEHQRVFXQGLVWDNKCGCRKQKSDCGVDCSCDPTKCRNRQQGKDSLGTVEQTQDSEGSFKLEDPTEVTPGLSFFNPVCATPNSKILXEMCDXEQVLSKKTXPAPSPFDLPELKHVATEYQENKAPGKKKKRALASNTSFFSGCSPIEEEAH

SEQ ID NO: 2354 - protein, 44 aa, Homo sapiens
FFFFFFFFFFFFFFFFFFFFFFFFFFFFFFFFLVYLFIYAIHHV

SEQ ID NO: 2355 - protein, 363 aa, Homo sapiens
  MISC_FEATURE (191): Xaa equals any of the twenty naturally occurring L-amino acids
RPTRPRIGEFCWRCSCRMVGGGGKRRPGGEGPQCEKTTDVKKSKFCEADVSSDLRKEVENHYKLSLPEDFYHFWKFCEELDPEKPSDSLSASLGLQLVGPYDILAGKHKTKKKSTGLNFNLHWRFYYDPPEFQTIIIGDNKTQYHMGYFRDSPDEFPVYVGINEAKKNCIIVPNGDNVFAAVKLFLTKKLXEITDKKKINLLKNIDEKLTEAARELGYSLEQRTVKMKQRDKKVVTKTFHGAGLVVPVDKNDVGYRELPETDADLKRICKTIVEAASDEERLKAFAPIQEMMTFVQFANDECDYGMGLELGMDLFCYGSHYFHKVAGQLLPLAYNLLKRNLFAEIIEEHLANRSQENIDQLAA

SEQ ID NO: 2356 - protein, 182 aa, Homo sapiens
LGSSPGPPRQVCLVTAGGRCFFPELGTSLSAMRFLAATFLLLALSTAAQAEPVQFKDCGSVDGVIKEVNVSPCPTQPCQLSKGQSYSVNVTFTSNIQSKSSKAVVHGILMGVPVPFPIPEPDGCKSGINCPIQKDKTYSYLNKLPVKSEYPSIKLVVEWQLQDDKNQSLFCWEIPVQIVSHL

SEQ ID NO: 2357 - protein, 119 aa, Homo sapiens
GCWRRGPGGAHCGRIPAPAPSVPAGPDSRVRGRSCAQARAGRRARAVPRGAEGPGKEAEKGTEERGEAASAGGRPCGPAPACQALGGRTGPGLPLQMGPKAQELEVSEDEADVAPAAHV

SEQ ID NO: 2358 - protein, 252 aa, Homo sapiens
ADGGRTVGYRRRKMAATLLAARGAGPAPAWGPEAFTPDWESREVSTGTTIMAVQFDGGVVLGADSRTTTGSYIANRVTDKLTPIHDRIFCCRSGSAADTQAVADAVTYQLGFHSIELNEPPLVHTAASLFKEMCYRYREDLMAGIIIAGWDPQEGGQVYSVPMGGMMVRQSFAIGGSGSSYIYGYVDATYREGMTKEECLQFTANALALAMERDGSSGGVIRLAAIAESGVERQVLLGDQIPKFAVATLPPA

SEQ ID NO: 2359 - protein, 376 aa, Homo sapiens
  MISC_FEATURE (46): Xaa equals any of the twenty naturally occurring L-amino acids
  MISC_FEATURE (49): Xaa equals any of the twenty naturally occurring L-amino acids
LADRVSLGAGKERPRGSVWCGEVAPGRRSGHYAGLALKGSSYSGLXERXHIHTKNVEHIIDSLRNEGIEVRLVKRREYDEETVRWADAVIAAGGDGTMLLARGKVLDRLKPVIGVNTDPERSEGHLCLPVRYTHSFPEALQKFYRGEFRWLWRQRIRLYLEGTGINPVPVDLHEQQLSLNQHNRALNIERAHDERSEASGPQLLPVRALNEVFIGESLSSRASYYEISVDDGPWEKQKSSGLNLCTGTGSKAWSFNINRVATQAVEDVLNIAKRQGNLSLPLNRELVEKVTNEYNESLLYSPEEPKILFSIREPIANRVFSSSRQRCFSSKVCVRSRCWDACMVVDGGTSFEFNDGAIASMMINKEDELRTVLLEQ

SEQ ID NO: 2360 - protein, 316 aa, Homo sapiens
  MISC_FEATURE (8): Xaa equals any of the twenty naturally occurring L-amino acids
CGRQGGGXPDMLAADLRCSLFASALQSYKRDSVLRPFPASYARGDCKDFEALLADASKLPNLKELLQSSGDNHKRAWDLVSWILSSKVLTIHSAGKAEFEKIQKLTGAPHTPVPAPDFLFEIEYFDPANAKFYETKGERDLIYAFHGSRLENFHSIIHNGLHCHLNKTSLFGEGTYLTSDLSLALIYSPHGHGWQHRLLGPILSCVAVCEVIDHPDVKCQTKKKDSKEIDRRRARIKHSEGGDIPPKYFVVTNNQLLRVKYLLVYSQKPPKRASSQLSWFSSHWFTVMISLYLLLLLIVSVINSSAFQHFWNRAKR

SEQ ID NO: 2361 - protein, 299 aa, Homo sapiens
  MISC_FEATURE (130): Xaa equals any of the twenty naturally occurring L-amino acids
  MISC_FEATURE (211): Xaa equals any of the twenty naturally occurring L-amino acids
  MISC_FEATURE (234): Xaa equals any of the twenty naturally occurring L-amino acids
  MISC_FEATURE (255): Xaa equals any of the twenty naturally occurring L-amino acids
LSFMEAQVYGSSCYFGLFLSVKDVMYICPFMGAVSGTLTVTDFKLYFKNVERDPHFILDVPLGVISRVEKIGAQSHGDNSCGIEIVCKDMRNLRLAYKQEEQSKLGIFENLNKHAFPLSNGQALFAFSYXEKFPINGWKVYDPVSEYKRQGLPNESWKISKINSNYEFCDTYPAIIVVPTSVKDDDLSKVAAFRAKGRVPVLSWIHPESQXTITRCSQPLVGPNDKRCKEDEKXLQTIMDVTHSHTSLSSLMLDXTVSLIPTSFGIRIQLASWNELGSMPSSSSFWMTHHLLPHLQQEP

SEQ ID NO: 2362 - protein, 205 aa, Homo sapiens
QTTMCYGKCARCIGHSLVGLALLCIAANILLYFPNGETKYASENHLSRFVWFFSGIVGGGLLMLLPAFVFIGLEQDDCCGCCGHENCGKRCAMLSSVLAALIGIAGSGYCVIVAALGLAEGPLCLDSLGQWNYTFASTEGQYLLDTSTWSECTEPKHIVEWNVSLFSILLALGGIEFILCLIQVINGVLGGICGFCCSHQQQYDC

SEQ ID NO: 2363 - protein, 76 aa, Homo sapiens
KVWGEGAVSGCGEGRRGSEKSGPSLSSPFPSFGKWFLRGPGASEYRTSISGAGSLVGTERPLPGTGGLAAESPAGA

SEQ ID NO: 2364 - protein, 224 aa, Homo sapiens
STMQAFLKGTSISTKPPLTKDRGVAASAGSSGENKKAKPVPWVEKYRPKCVDEVAFQEEVVAVLKKSLEGADLPNLLFYGPPGTGKTSTILAAARELFGPELFRLRVLELNASDERGIQVVREKVKNFAQLTVSGSRSDGKPCPPFKIVILDEADSMTSAAQAALRRTMEKESKTTRFCLICNYVSRIIEPLTSRCSKFRFKPLSDKNSTAAITRHCQEGKCQN

SEQ ID NO: 2365 - protein, 91 aa, Homo sapiens
ARGQHPLRGRWRRGLNSAPPPAARIKKIMQTDEEIGKVAAAVPVIISRALELFLESLLKKACQVTQSRNESTMTTSHLKQCIRAGAAVLIL

SEQ ID NO: 2366 - protein, 156 aa, Homo sapiens
  MISC_FEATURE (148): Xaa equals any of the twenty naturally occurring L-amino acids
  MISC_FEATURE (152): Xaa equals any of the twenty naturally occurring L-amino acids
  MISC_FEATURE (153): Xaa equals any of the twenty naturally occurring L-amino acids
LLGHRSGTLHAVAATAVVAGRPRGRDTGCPRCKQNSTCIAAVKMEGPLSVFGDRSTGETIRSQNVMAAASIANIVKSSLGPVGLDKMLVDDIGDVTITNDGATILKLLEVEHPAAKVLCELADLQDKEVGDGLLQWLYSADSKNQMIXTESXXSIV

SEQ ID NO: 2367 - protein, 140 aa, Homo sapiens
  MISC_FEATURE (43): Xaa equals any of the twenty naturally occurring L-amino acids
  MISC_FEATURE (62): Xaa equals any of the twenty naturally occurring L-amino acids
TGTASWKQWAREFSEQLSSSRGDGRRVECFAVSGELSRRLGSXGGADRHGCAGGNSTGADQXRYNLRITSGVVVCQCGLSIPSHSSELTEQKLRACLEGSINEHSAHCPHTPEFSVTGGTEEKSSLLMSCLACDTWAVIL

SEQ ID NO: 2368 - protein, 107 aa, Homo sapiens
  MISC_FEATURE (2): Xaa equals any of the twenty naturally occurring L-amino acids
  MISC_FEATURE (37): Xaa equals any of the twenty naturally occurring L-amino acids
  MISC_FEATURE (49): Xaa equals any of the twenty naturally occurring L-amino acids
  MISC_FEATURE (102): Xaa equals any of the twenty naturally occurring L-amino acids
KXRFQVGTCRMLCPLQDDAVRAECPLLAAPEQGQPRXPNVAHPSHQRAXPGPAPDATLQSPHSAKSVGQAQAPHQSRGPPPAPTTVAVAKPAAPPRSLRCRXLAFPS

SEQ ID NO: 2369 - protein, 230 aa, Homo sapiens
  MISC_FEATURE (46): Xaa equals any of the twenty naturally occurring L-amino acids
GTAHPAHLCARFKSWRLAGRSVLCPGPEAQPGHQVEHQLRVAQRSXPSTEPPAAAEMLRTESCRPRSPAGQVAAASPLLLLLLLLAWCAGACRGAPILPQGLQPEQQLQLWNEIDDTCSSFLSIDSQPQASNALEELCFMIMGMLPKPQEQDEKDNTKRFLFHYSKTQKLGKSNVVSSVVHPLLQLVPHLHERRMKRFRVDEEFQSPFASQSRGYFLFRPRNGRRSAGFI

SEQ ID NO: 2370 - protein, 182 aa, Homo sapiens
GTREFGHYGRGGQPGSVKDPKMAGRKLALKTIDWVAFAEIIPQNQKAIASSLKSWNETLTSRLAALPENPPAIDWAYYKANVAKAGLVDDFEKKFNALKVPVPEDKYTAQVDAEEKEDVKSCAEWVSLSKARIVEYEKEMEKMKNLIPFDQMTIEDLNEAFPETKLDKKKYPYWPHQPIENL

SEQ ID NO: 2371 - protein, 301 aa, Homo sapiens
  MISC_FEATURE (231): Xaa equals any of the twenty naturally occurring L-amino acids
RVRREICRIITKGTQTYSVLEGDPSENYSKYLLSLKEKEEDSSGHTRAYGVCFVDTSLGKFFIGQFSDDRHCSRFRTLVAHYPPVQVLFEKGNLSKETKTILKSSLSCSLQEGLIPGSQFWDASKTLRTLLEEEYFREKLSDGIGVMLPQVLKGMTSESDSIGLTPGEKSELALSALGGCVFYLKKCLIDQELLSMANFEEYIPLDSDTVSTTRSGAIFTKAYQRMVLDAXTLNNLEIFLNGTNGSTEGTLLERVDTCHTPFGKRLLKQWLCAPLCNHYAINDRLDAIEDLMVVPEHISEL

SEQ ID NO: 2372 - protein, 181 aa, Homo sapiens
ASWGRAMSHGAGLVRTTCSSGSALGPGAGAAQPSASPLEGLLDLSYPRTHAALLKVAQMVTLLIAFICVRSSLWTNYSAYSYFEVVTICDLIMILAFYLVHLFRFYRVLTCISWPLSELLHYLIGTLLLLIASIVAASKSYNQSGLVAGAIFGFMATFLCMASIWLSYKISCVTQSTDAAV

SEQ ID NO: 2373 - protein, 492 aa, Homo sapiens
  MISC_FEATURE (58): Xaa equals any of the twenty naturally occurring L-amino acids
  MISC_FEATURE (147): Xaa equals any of the twenty naturally occurring L-amino acids
  MISC_FEATURE (150): Xaa equals any of the twenty naturally occurring L-amino acids
  MISC_FEATURE (169): Xaa equals any of the twenty naturally occurring L-amino acids
EIIALEDARINLLKETEQLEIKEVHIEKNDAETLQKCLILCYELLKQMSISTGLSATXNGIIESLILPGIISIHPVVRNLAVLCLGCCGLQNQDFARKHFVLLLQVLQIDDVTIKISALKAIFDQLMTFGIEPFKTKKIKTLHCEGXEIXSDDEQESKEVEETATAKNXLKLLSDFLDSEVSELRTGAAEGLAKLMFSGLLVSSRILSRLILLWYNPVTEEDVQLRHCLGVFFPVFAYASRTNQECFEEAFLPTLQTLANAPASSPLAEIDITNVAELLVDLTRPSGLNPQAKTSQDYQALTVHDNLAMKICNEILTSPCSPEIRVYTKALSSLELSSHLAKDLLVLLNEILEQVKDRTCLRALEKIKIQLEKGNKEFGDQAEAAQDATLTTTTFQNEDEKNKEVYMTPLRGVKATQASKSTQLKTNRGQRKVTVSARTNRRCQTAEADSESDHEVPEPESEMKMRLPRRAKTAALEKSKLNLAQFLNEDLS

SEQ ID NO: 2374 - protein, 203 aa, Homo sapiens
SSYMRGGYFSSSHEGFSYEKDPRLYFDDTCVVPERLEGKVKQEPTMYREGPPYQRRGSLQLWQFLVTLLDDPANAHFIAWTGRGMEFKLIEPEEVARRWGIQKNRPAMNYDKLSRSLRYYYEKGIMQKVAGERYVYKFVCDPDALFSMAFPDNQRPFLKAESECHLSEEDTLPLTHFEDSPAYLLDMDRCSSLPYAEVCLLSF

SEQ ID NO: 2375 - protein, 64 aa, Homo sapiens
NFGRPRWVDHLSSGVPDQPGPMAKLRLYKKIEKISQVWWCMPVVTVTRQAEVGGSLEPQRSRLQ

SEQ ID NO: 2376 - protein, 440 aa, Homo sapiens
  MISC_FEATURE (438): Xaa equals any of the twenty naturally occurring L-amino acids
AAGPSLSHTSGGTQSKVVPIASLTPYQSKWTICARVTNKSQIRTWSNSRGEGKLFSLELVDESGEIRATAFNEQVDKFFPLIEVNKVYYFSKGTLKIANKQFTAVKNDYEMTFNNETSVMPCEDDHHLPTVQFDFTGIDDLENKSKDSLVDIIGICKSYEDATKITVRSNNREVAKRNIYLMDTSGKVVTATLWGEDADKFDGSRQPVLAIKGARVSDFGGRSLSVLSSSTIIANPDIPEAYKLRGWFDAEGQALDGVSISDLKSGGVGGSNTNWKTLYEVKSENLGQGDKPDYFSSVATVVYLRKENCMYQACPTQDCNKKVIDQQNGLYRCEKCDTEFPNFKYRMILSVNIADFQENQWVTCFQESAEAILGQNAAYLGELKDKNEQAFEEVFQNANFRSFIFRVRVKVETYNDESRIKATVMDVKPVDYREYGRXWS

SEQ ID NO: 2377 - protein, 82 aa, Homo sapiens
SPVRGSGGAMLQVQVNLPVSPLPTYPYSFFYPDKEGSCPQVNINFPQLGLCRDQCQVDSQCPGQMKCCRNGCGKVSCVTPNF

SEQ ID NO: 2378 - protein, 206 aa, Homo sapiens
  MISC_FEATURE (15): Xaa equals any of the twenty naturally occurring L-amino acids
  MISC_FEATURE (18): Xaa equals any of the twenty naturally occurring L-amino acids
  MISC_FEATURE (57): Xaa equals any of the twenty naturally occurring L-amino acids
  MISC_FEATURE (92): Xaa equals any of the twenty naturally occurring L-amino acids
FSTRSRGPPCGPFLXSEXICSASSCRCRARHRVLARRSQNTRSLPPPSLSPASRSPXPTPAATLRDSLSGGLCSSTAGLIRGTASMDLQGRXVPSIDRLRVLLMLFHTMAQIMAEQEVENLSGLSTNPEKDIFVVRENGTTCLMAEFAAKFIVPYDVWASNYVDLITEQADIALTRGAEVKGRCGTASRSCKCSGWIAHMHSKCSL

SEQ ID NO: 2379 - protein, 232 aa, Homo sapiens
  MISC_FEATURE (228): Xaa equals any of the twenty naturally occurring L-amino acids
PASSPAPACPGLSWLARTPAHPVPQRWGPRAGWGLGWGWGCSAVPGPTAVLPPGSPKAALHSPVSEGAPVIPPSSGLPLPTPDARVGASTCGPPDHLLPPLGTPLPPDWVTLEGDFVLMLAISPSHLGADLVAAPHARFDDGLVHLCWVRSGISRAALLRLFLAMERGSHFSLGCPQLGYAAARAFRLEPLTPRGVLTVDGEQVEYGPLQAQMHPGIGTLLTGPPGCXGREP

SEQ ID NO: 2380 - protein, 229 aa, Homo sapiens
  MISC_FEATURE (62): Xaa equals any of the twenty naturally occurring L-amino acids
  MISC_FEATURE (63): Xaa equals any of the twenty naturally occurring L-amino acids
  MISC_FEATURE (227): Xaa equals any of the twenty naturally occurring L-amino acids
VSPTEQRFPRKTQSDPPVNCWARECRGAPSAPGAEAKGAEPAADGARSLPASLARPSGFARXXRRARAMKAVSPVRPSGRKAPSGCGGGELALRCLAEHGHSLGGSAAAAAAAAAARCKAAEAAADEPALCLQCDMNDCYSRLRRLVPTIPPNKKVSKVEILQHVIDYILDLQLALETHPALLRQPPPPAPPHHPAGTCPAAPPRTPLTALNTDPAGAVNKQGDSIXCR

SEQ ID NO: 2381 - protein, 129 aa, Homo sapiens
  MISC_FEATURE (14): Xaa equals any of the twenty naturally occurring L-amino acids
  MISC_FEATURE (42): Xaa equals any of the twenty naturally occurring L-amino acids
TSSRLSETFQSAFXPNGILAEAVPCRDKSIRMRTRVAGKTKXLAIMPDELKHIIGAETTRKGILRVFEMFQHNQLNRRMVYVFLEGFLETLFPQYKFRELFNKLHSRSKQMQKYKQKLQTTQAPSLQKR

SEQ ID NO: 2382 - protein, 401 aa, Homo sapiens
  MISC_FEATURE (87): Xaa equals any of the twenty naturally occurring L-amino acids
  MISC_FEATURE (136): Xaa equals any of the twenty naturally occurring L-amino acids
  MISC_FEATURE (377): Xaa equals any of the twenty naturally occurring L-amino acids
  MISC_FEATURE (395): Xaa equals any of the twenty naturally occurring L-amino acids
SNLPSCPPRPDDDYSPPSKRPKANELPQPPVPEPANAGKRKVREFNFEKWNARITDLRKQVEELFERKYAQAIKAKGPVTIPYPLFXSHVEDLYVEGLPEGIPFRRPSTYGIPRLERILLAKERIRFVIKKHELLXSTREDLQLDKPASGVKEEWYARITKLRKMVDQLFCKKFAEALGSTEAKAVPYQKFEAHPNDLYVEGLPENIPFRSPSWYGIPRLEKIIQVGNRIKFVIKRPELLTHSTTEVTQPRTNTPVKEDWNVRITKLRKQVEEIFNLKFAQALGLTEAVKVPYPVFESNPEFLYVEGLPEGIPFRSPTWFGIPRLERIVRGSNKIKFVVKKPELVISYLPPGMASKINTKALQSPKRPRSPGSNSKXPEIEVTVEGPNTTILNLXVRTRPD

SEQ ID NO: 2383 - protein, 187 aa, Homo sapiens
LPRTFCQLILDPIFKVFDAIMNFKKEETAKLIEKLDIKPVLMMNKMDRALLELQLEPEELYQTFQRIVENVNVIISTYGEGESGPMGNIMIDPVLGTVGFGSGLHGWAFTLKQFAEMYVAKFAAKGEGQLGPAERAKKVEDMMKKLWGDRYFDPANGKFSKSATSPEGSKLPRTFCQLILGPHLQGV

SEQ ID NO: 2384 - protein, 78 aa, Homo sapiens
FLHHPGFKGKTKGAELVAATGKLQEGGQEPHPTGLGGAQRPHLFLLQELSRQQKGVTQPKEEMAQRGCTKGPRGPTRV

SEQ ID NO: 2385 - protein, 228 aa, Homo sapiens
  MISC_FEATURE (211): Xaa equals any of the twenty naturally occurring L-amino acids
GNLEGGSHSLPSFLRVCDSEMDKVCAVFGGSRGIGRAVAQLMARKGYRLAVIARNLEGAKAAAGDLGGDHLAFSCDVAKEHDVQNTFEEMEKHLGRVNFLVNAAGINRDGLLVRTKTEDMVSQLHTNLLGSMLTCKAAMRTMIQQQGGSIVNVGSIVGLKGNSGQSVYSASKGGLVGFSRALAKEVARKKIRVNVVAPELIPRTVSIRKMXKGDRINVTLRSPEQHGT

SEQ ID NO: 2386 - protein, 112 aa, Homo sapiens
  MISC_FEATURE (43): Xaa equals any of the twenty naturally occurring L-amino acids
  MISC_FEATURE (45): Xaa equals any of the twenty naturally occurring L-amino acids
  MISC_FEATURE (70): Xaa equals any of the twenty naturally occurring L-amino acids
  MISC_FEATURE (75): Xaa equals any of the twenty naturally occurring L-amino acids
  MISC_FEATURE (82): Xaa equals any of the twenty naturally occurring L-amino acids
  MISC_FEATURE (96): Xaa equals any of the twenty naturally occurring L-amino acids
  MISC_FEATURE (98): Xaa equals any of the twenty naturally occurring L-amino acids
  MISC_FEATURE (105): Xaa equals any of the twenty naturally occurring L-amino acids
LISPSLLSAATFGTASMSMPTGFGTPAPYSLPTSFSGSFQQPXFXAQAAFPQQTAFSQQPMVRSNIWRAXKSFYXSFLYHNXVCLGRKTFLKNTIXLXTEGYTKXKALVIWT

SEQ ID NO: 2387 - protein, 106 aa, Homo sapiens
AWSPFLGSARPRLRFSPYQIPVTIPPSTSLLTTGLASEGSKAAGGNSREPSPLPELALRKVGAPSRGALSPSGSAKEAANELQSIQRLVSGLESQRALSPGRESPK

SEQ ID NO: 2388 - protein, 284 aa, Homo sapiens
ARGEPAHRTLGRVVSARAPPRGFATFSDYCACATPAARLGPWLLVPGDARRLPGLQAVAGCRWESRTVRGPRCPRRWRTWAAGESMAQRMVWVDLEMTGLDIEKDQIIEMACLITDSDLNILAEGPNLIIKQPDELLDSMSDWCKEHHGKSGLTKAVKESTITLQQAEYEFLSFVRQQTPPGLCPLAGNSVHEDKKFLDKYMPQFMKHLHYRIIDVSTVKELCRRWYPEEYEFAPKKAASHRALDDISESIKELQFYRNNIFKKKIDEKKRKIIENGENEKTVS

SEQ ID NO: 2389 - protein, 486 aa, Homo sapiens
  MISC_FEATURE (64): Xaa equals any of the twenty naturally occurring L-amino acids
GTARARHGGAHRGDAPRPLAPFGPGPCPGSVARPGCGGLRRSRKRKKVDNDYNALRERLSTLPXKLSYNIMVPFGPFAFMPGKLVHTNEVTVLLGDNWFAKCSAKQAVGLVEHRKEHVRKTIDDLKKVMKNFESRVEFTEDLQKMSDAAGDIVDIREEIKCDFEFKAKHRIAHKPHSKPKTSDIFEADIANDVKSKDLLADKELWARLEELERQEELLGELDSKPDTVIANGEDTTSSEEEKEDRNTNVNAMHQVTDSHTPCHKDVASSEPFSGQVNSQLNCSVNGSSSYHSDDDDDDDDDDDDNIDDDDGDNDHEALGVGDNSIPTIYFSHTVEPKRVRINTGKNTTLKFSEKKEEAKRKRKNSTGSGHSAQELPTIRTPADIYRAFVDVVNGEYVPRKSILKSRSRENSVCSDTSESSAAEFDDRRGVLRSISCEEATCSDTSESILEEEPQENQKKLLPLSVTPEVLRLVGYSRNLAPLNVIL

SEQ ID NO: 2390 - protein, 86 aa, Homo sapiens
  MISC_FEATURE (62): Xaa equals any of the twenty naturally occurring L-amino acids
  MISC_FEATURE (78): Xaa equals any of the twenty naturally occurring L-amino acids
PVWDDFSMSQATKRKHVVKEVLGEHIVPSDQQQIVRVLRTPGNNLHEVETAQGQRFLVSMPXKYRKNIWIKRGDFSLXTPLKREKR

SEQ ID NO: 2391 - protein, 204 aa, Homo sapiens
  MISC_FEATURE (82): Xaa equals any of the twenty naturally occurring L-amino acids
  MISC_FEATURE (96): Xaa equals any of the twenty naturally occurring L-amino acids
  MISC_FEATURE (148): Xaa equals any of the twenty naturally occurring L-amino acids
VAYQDSPICGNLPLERYYRNNYKYVCTPRATPHCSPGTPEKDCRYCISWHPSHNKGQLCLPKCWWTAGSSLHVYIHTYPATXIYVIKKGTHTRLAXQATKMRNAIYQNRLALDYLLALEGVVCGKFNLTNCCLEIDDNGKAIMEITAXMRKLAHVPVQTWKGWSPDSLFGGLVFIFLRVQDFNRSGSGHIRKLPNTPLSLTSPC

SEQ ID NO: 2392 - protein, 138 aa, Homo sapiens
VGNGAERGCAGASRGEAAAAMDVFLMIRRHKTTIFTDAKESSTVFELKRIVEGILKRPPDEQRLYKDDQLLDDGKTLGECGFTSQTARPQAPATVGLAFRADDTFEALCIEPFSSPPELPDVMKPQDSGSSANEQAVQ

SEQ ID NO: 2393 - protein, 122 aa, Homo sapiens
GPAKGGKKKKDPNAPKRPPSGFFLFCSEFRPKIKSTNPGISIGDVAKKLGEMWNNLNDSEKQPYITKAAKLKEKYEKDVADYKSKGKFDGAKGPAKVARKKVEEEDEEEEEEEEEEEEEEDE

SEQ ID NO: 2394 - protein, 155 aa, Homo sapiens
  MISC_FEATURE (26): Xaa equals any of the twenty naturally occurring L-amino acids
HTLRSWLWCFPAREEKSNFFKAFIEXQQREGVRLPPCLAETEGGSWLRNAAAADVLRNLPEVEWREPQHCCPPTPRKRKQNPRVPLPHYPPNPAAAIAADTMPKRKKQNHHQPPTQQQPPLPEREETGDEEDGSPIGEGSGRDVHMPVKPVRARG

SEQ ID NO: 2395 - protein, 219 aa, Homo sapiens
  MISC_FEATURE (14): Xaa equals any of the twenty naturally occurring L-amino acids
  MISC_FEATURE (82): Xaa equals any of the twenty naturally occurring L-amino acids
RGEAGPLGPGCGGXGGGRSGGGGSRARRAVPPARPPARSLARRAALPTASMLPRVGCPALPLPPPPLLPLLPLLLLLLGASXGGGGARAEVLFRCPPCTPERLAACGPPPVAPPAAVAAVAGGARMPCAELVREPGCGCCSVCARLEGEACGVYTPRCGQGLRCYPHPGSELPLQALVMGEGTCEKRRDAEYGASRSRLQTMAMTTQKEAWWRTTWTAP

SEQ ID NO: 2396 - protein, 709 aa, Homo sapiens
MSERGIKWACEYCTYENWPSAIKCTMCRAQRPSGTIITEDPFRSGSSDVGRDWDPSSTEGGSSPLICPDSSARPRVKSSYSMENANKWSCHMCTYLNWPRAIRCTQCLSQRRTRNPTESPQILRIWFKTSWPFSVDPCEEYNDRNKLNTRTQHWTCSVCTYENWAKAKKCVVCDHPRPNNIEAIELAETEEASSIINEQDRARWRGSCSSGNSQRRSPPATKRDSEVKMDFQRIELAGAVGSKEELEVDFKKLKQIKNRMKKTDWLFLNACVGVVEGDLAAIEAYKSSGGDIARQLTADEVRLLNRPSAFDVGYTLVHLAIRFQRQDMLAILLTEVSQQAAKCIPAMVCPELTEQIRREIAASLHQRKGDFACYFLTDLVTFTLPADIEDLPPTVQEKLFDEVLDRDVQKELEEESPIINWSLELATRLDSRLYALWNRTAGDCLLDSVLQATWGIYDKDSVLRKALHDSLHDCSHWFYTRWKDWESWYSQSFGLHFSLREEQWQEDWAFILSLASQPGASLEQTHIFVLAHILRRPIIVYGVKYYKSFRGETLGYTRFQGVYLPLLWEQSFCWKSPIALGYTRGHFSALVAMENDGYGNRGAGANLNTDDDVTITFLPLVDSERKLLHVHFLSAQELGNEEQQEKLLREWLDCCVTEGGVLVAMQKSSRRRNHPLVTQMVEKWLDRYRQIRPCTSLSDGEEDEDDEDE

SEQ ID NO: 2397 - protein, 263 aa, Homo sapiens
  MISC_FEATURE (8): Xaa equals any of the twenty naturally occurring L-amino acids
NSRVRTHXVPPRPLPCSEGGERLLPTQKQPGGGQVNSSRYKTELCRPFEENGACKYGDKCQFAHGIHELRSLTRHPKYKTELCRTFHTIGFCPYGPRCHFIHNAEERRALAGARDLSADRPRLQHSFSFAGFPSAAATAAATGLLDSPTSITPPPILSADDLLGSPTLPDGTNNPFAFSSQELASLFAPSMGLPGGGSPTTFLFRPMSESPHMFDSPPSPQDSLSDQEGYLSSSSSSHSGSDSPTLDNSRRLPIFSRLSISDD

SEQ ID NO: 2398 - protein, 40 aa, Homo sapiens
RDLGPLHPPPPGSKQLSCLNIWSSWNYRHAPLHPANFLYF

SEQ ID NO: 2399 - protein, 238 aa, Homo sapiens
AWVRTIPFGDQRWTVTQPMEVLIPTMAITQFRLFKFCTCLATVFSFLKRLICRSGRGRKLSGDQITLPTTVDYSSVPKQTDVEEWTSWDEDAPTSVKIEGGNGNVATQQNSLEQLEPDYFKDMTPTIRKTQKIVIKKREPLNFGIPDGSTGFSSRLAATQDLPFIHQSSELGDLDTWQENTNAWEEEEDAAWQAEEVLRQQKLADREKRAAEQQRKKMEKEAQRLMKKEQNKIGVKLS

SEQ ID NO: 2400 - protein, 50 aa, Homo sapiens
  MISC_FEATURE (35): Xaa equals any of the twenty naturally occurring L-amino acids
  MISC_FEATURE (43): Xaa equals any of the twenty naturally occurring L-amino acids
KRPLLSSAILTFLTYLMKMSFERCTARNKMFVNSXFTKVSFLXDAKEFQY

SEQ ID NO: 2401 - protein, 28 aa, Homo sapiens
  MISC_FEATURE (24): Xaa equals any of the twenty naturally occurring L-amino acids
  MISC_FEATURE (26): Xaa equals any of the twenty naturally occurring L-amino acids
GFSNYPNSNCLWQGVLAIGKYHRXWXPV

SEQ ID NO: 2402 - protein, 63 aa, Homo sapiens
LPRVISAAASPLHMLATHASASASLPTKRHNGDQPEQPELKRIKTEDGEGIVIALSVDTHRQP

SEQ ID NO: 2403 - protein, 201 aa, Homo sapiens
CNLAKGVISISFLKEEEQEDEEEIDVVSVEKRQAPGKRSESGSPSAGGHSKPPHSPLVLKRCHVSTHQHNYAAPPSTRKDYPAAKRVKLDSVRVLRQISNNRKCTSPRSSDTEENVKRRTHNVLERQRRNELKRSFFALRDQIPELENNEKAPKVVILKKATAYILSVQAEEQKLISEEDLLRKRREQLKHKLEQLRNSCA

SEQ ID NO: 2404 - protein, 126 aa, Homo sapiens
  MISC_FEATURE (108): Xaa equals any of the twenty naturally occurring L-amino acids
GTEKGLGHWKRVPGSQPSFPSRLKDAKESGKGVPRLIGIRLTLPPPKVVDRWNEKRAMFGVYDNIGILGNFEKHPKELIRGPIWLRGWKGNELQRCIRKRKMVGSRMXADDLHNLNKTHPLSLQTL

SEQ ID NO: 2405 - protein, 227 aa, Homo sapiens
  MISC_FEATURE (133): Xaa equals any of the twenty naturally occurring L-amino acids
EKRTSGLRRTPKQVDPGLPKMQVIRNYSGTPPPALHEGPPLQLQAGNTVELLKGDAHSLFWQGRNLASGEVGFFPSDAVKPCPCVPKPVDYSCQPWYAGAMERLQAETELINRVNSTYLVRHRTKESGEYAIXIKYNNEAKHIKILTRDGFFHIAENRKFKSLMELVEYYKHHSLKEGFRTLDTTLQFPYKEPEHSAGQRGNRAGNSLLSPKVLGIASLGMTSVQEI

SEQ ID NO: 2406 - protein, 263 aa, Homo sapiens
FMLPSLADVSKLCIGIPKEYLVPELSSEVQSLWSKAADLFESEGAKVIEVSLPHTSYSIVCYHVLCTSEVASNMARFDGLQYGHRCDIDVSTEAMYAATRREGFNDVVRGRILSGNFFLLKENYENYFVKAQKVRRLIANDFVNAFNSGVDVLLTPTTLSEAVPYLEFIKEDNRTRSAQDDIFTQAVNMAGLPAVSIPVALSNQGLPIGLQFIGRAFCDQQLLTVAKWFEKQVQFPVIQLQELMDDCSAVLENEKLASVSLKQ

SEQ ID NO: 2407 - protein, 199 aa, Homo sapiens
GKAEDLPDQPQLSLLPPTSLACICHSFHYIKRLLETLFVHRFSHGTMPLRNIFKNCTYYWGFAAWMAYYINHPLYTPPTYGAQQVKLALAIFVICQLGNFSIHMALRDLRPAGSKTRKIPYPTKNPFTWLFLLVSCPNYTYEVGSWIGFAIMTQCLPVALFSLVGFTQMTIWAKGKHRSYLKEFRDYPPLRMPIIPFLL

SEQ ID NO: 2408 - protein, 133 aa, Homo sapiens
QICQLGNFSIHMALRDLRPAGECLLGAGGQLGWVRGSDFLLLSCLPGSKTRKIPYPTKNPFTWLFLLVSCPNYTYEVGSWIGFAIMTQCLPVALFSLVGFTQMTIWAKGKHRSYLKEFRDYPPLRMPIIPFLL

SEQ ID NO: 2409 - protein, 903 aa, Homo sapiens
  MISC_FEATURE (10): Xaa equals any of the twenty naturally occurring L-amino acids
  MISC_FEATURE (15): Xaa equals any of the twenty naturally occurring L-amino acids
  MISC_FEATURE (16): Xaa equals any of the twenty naturally occurring L-amino acids
  MISC_FEATURE (795): Xaa equals any of the twenty naturally occurring L-amino acids
LKEPGPKGGXGNRGXXGETGDDGRDGVGSEGRRGKKGERGFPGYPGPKGNPGEPGLNGTTGPKGIRGRRGNSGPPGIVGQKGDPGYPGPAGPKGNRGDSIDQCALIQSIKDKCPCCYGPLECPVFPTELAFALDTSEGVNQDTFGRMRDVVLSIVNDLTIAESNCPRGARVAVVTYNNEVTTEIRFADSKRKSVLLDKIKNLQVALTSKQQSLETAMSFVARNTFKRVRNGFLMRKVAVFFSNTPTRASPQLREAVLKLSDAGITPLFLTRQEDRQLINALQINNTAVGHALVLPAGRDLTDFLENVLTCHVCLDICNIDPSCGFGSWRPSFRDRRAAGSDVDIDMAFILDSAETTTLFQFNEMKKYIAYLVRQLDMSPDPKASQHFARVAVVQHAPSESVDNASMPPVKVEFSLTDYGSKEKLVDFLSRGMTQLQGTRALGSAIEYTIENVFESAPNPRDLKIVVLMLTGEVPEQQLEEAQRVILQAKCKGYFFVVLGIGRKVNIKEVYTFASEPNDVFFKLVDKSTELNEEPLMRFGRLLPSFVSSENAFYLSPDIRKQCDWFQGDQPTKNLVKFGHKQVNVPNNVTSSPTSNPVTTTKPVTTTKPVTTTTKPVTTTTKPVTIINQPSVKPAAAKPAPAKPVAAKPVATKTATVRPPVAVKPATAAKPVAAKPAAVRPPAAAAAKPVATKPEVPRPQAAKPAATKPATTKPMVKMSREVQVFEITENSAKLHWERPEPPGPYFYDLTVTSAHDQSLVLKQNLTVTDRVIGGLLAGQTYHVAVVCYLRSQVRAXYHGSFSTKKSQPPPPQPARSASSSTINLMVSTEPLALTETDICKLPKDEGTCRDFILKWYYDPNTKSCARFWYGGCGGNENKFGSQKECEKVCAPVLAKPGVISVMGT

SEQ ID NO: 2410 - protein, 343 aa, Homo sapiens
QRAAAALREPVPSVGALGQGSPDSMSVGFIGAGQLAFALAKGFTAAGVLAAHKIMASSPDMDLATVSALRKMGVKLTPHNKETVQHSDVLFLAVKPHIIPFILDEIGADIEDRHIVVSCAAGVTISSIEKKLSAFRPAPRVIRCMTNTPVVVREGATVYATGTHAQVEDGRLMEQLLSSVGFCTEVEEDLIDAVTGLSGSGPAYAFTALDALADGGVKMGLPRRLAVRLGAQALLGAAKMLLHSEQHPGQLKDNVSSPGGATIHALHVLESGGFRSLLINAVEASCIRTRELQSMADQEQVSPAAIKKTILDKVKLDSPAGTALSPSGHTKLLPRSLAPAGKD

SEQ ID NO: 2411 - protein, 1086 aa, Homo sapiens
  MISC_FEATURE (19): Xaa equals any of the twenty naturally occurring L-amino acids
  MISC_FEATURE (47): Xaa equals any of the twenty naturally occurring L-amino acids
  MISC_FEATURE (428): Xaa equals any of the twenty naturally occurring L-amino acids
  MISC_FEATURE (453): Xaa equals any of the twenty naturally occurring L-amino acids
  MISC_FEATURE (454): Xaa equals any of the twenty naturally occurring L-amino acids
GRDSVQLEALDIMADMLSXEGGLLVNFHPSILTCLLPQLTSPRLAVXEKNHYRSWPSGYEAVGNIVFVDLIEHLLSELSKNDSMSTTRTYIQCIAAISRQAGHRIGEYLEKIIPLVVKFCNVDDDELREYCIQAFESFVRRCPKEVYPHVSTIINICLKYLTYDPNYNYDDEDEDENAMDADGGDDDDQGSDDEYSDDDDMSWKVRRAAAKCLDAVVSTRHEMLPEFYKTVSPALISRFKEREENVKADVFHAYLSLLKQTRPVQSWLCDPDAMEQGETPLTMLQSQVPNIVKALHKQMKEKSVKTRQCCFNMLTELVNVLPGALTQHIPVLVPGIIFSLNDKSSSSNLKIDALSCLYVILCNHSPQVFHPHVQALVPPVVACVGDPFYKITSEALLVTQQLVKVIRPLDQPSSFDATPYIKDLFTCXIKRLKAADIDQEVKERAISCMGQIXXNLGDNLGSDLPNTLQIFLERLKNEITRLTTVKALTLIAGSPLKIDLRPVLGEGVPILASFLRKNQRALKLGTLSALDILIKNYSDSLTAAMIDAVLDELPPLISESDMHVSQMAISFLTTLAKVYPSSLSKISGSILNELIGLVRSPLLQGGALSAMLDFFQALVVTGTNNLGYMDLLRMLTGPVYSQSTALTHKQSYYSIAKCVAALTRACPKEGPAVVGQFIQDVKNSRSTDSIRLLALLSLGEVGHHIDLSGQLELKSVILEAFSSPSEEVKSAASYALGSISVGNLPEYLPFVLQEITSQPKRQYLLLHSLKEIISSASVVGLKPYVENIWALLLKHCECAEEGTRNVVAECLGKLTLIDPETLLPRLKGYLISGSSYARSSVVTAVKFTISDHPQPIDPLLKNCIGDFLKTLEDPDLNVRRVALVTFNSAAHNKPSLIRDLLDTVLPHLYNETKVRKELIREVEMGPFKHTVDDGLDIRKAAFECMYTLLDSCLDRLDIFEFLNHVEDGLKDHYDIKMLTFLMLVRLSTLCPSAVLQRLDRLVEPLRATCTTKVKANSVKQEFEKQDELKRSAMRAVAALLTIPEAEKSPLMSEFQSQISSNPELAAIFESIQKDSSSTNLESMDTS

SEQ ID NO: 2412 - protein, 135 aa, Homo sapiens
  MISC_FEATURE (128): Xaa equals any of the twenty naturally occurring L-amino acids
KMTSLAQQLQRLALPQSDASLLSRDEVASLLFDPKEAATIDRDTAFAIGCTGLEELLGIDPSFEQFEAPLFSQLAKTLERSVQTKAVNKQLDENISLFLIHLSPYFLLKPAQKCLEWLIHRFHIHLYXQDSLIAW

SEQ ID NO: 2413 - protein, 311 aa, Homo sapiens
  MISC_FEATURE (215): Xaa equals any of the twenty naturally occurring L-amino acids
QRRWRPAQKRPTLSVRNKTPQPRLPLGLLHACAARPRQGAVQSRAGRGGGRARKSPKGRHPLACGVHLRTRVKSQVPGCGGSILSPFCQPMCPHLRPVPGTPCLPRWAALSPGDSVPSMPWLAETLNSSLGTVGLSPPLLPCLPLSVPGRLGAGQPEAETKAPHRRAQEVPALGTASSVAPARHQFPEGRSRPPPAAAVGLHSPAQPKAPRSWDXATPSEMLCPFSPVPLDAPSPQCSGDPWGTEQEGLDPVAQPKATRQPQPAQPPSSAWGLATGSSQWTPAPRGGRGTAPTAQQTCELPECNLCDVFQR

SEQ ID NO: 2414 - protein, 17 aa, Homo sapiens
ITTTLRYHFSPIRLSKT

SEQ ID NO: 2415 - protein, 47 aa, Homo sapiens
MLRFSSSLLECLLSPLCLTDATGHHLDHPILVPVQVQKRNNVLKFTS

SEQ ID NO: 2416 - protein, 300 aa, Homo sapiens
  MISC_FEATURE (19): Xaa equals any of the twenty naturally occurring L-amino acids
  MISC_FEATURE (61): Xaa equals any of the twenty naturally occurring L-amino acids
  MISC_FEATURE (220): Xaa equals any of the twenty naturally occurring L-amino acids
RPCERTVRPRHSGHSGPNXCCSCRCSSCSRRSGNCRTTSHSCCRSANSWSGAAPPWSGSSXELGPRLEETKWEVCQKSGEISLLKQQLKESQAELVQKGSELVALRVALREARATLRVSEGRARGLQEAARARELELEACSQELQRHRQEAEQLREKAGQLDAEAAGLREPPVPPATADPFLLAESDEAKVQRAAAGVGGSLRAQVERLRVELQRERRRXEEQRDSFEGERLAWQAEKEQVIRYQKQLQHNYIQMYRRNRQLEQELQQLSLELEARELADLGLAEQAPCICLEEITATEI

SEQ ID NO: 2417 - protein, 255 aa, Homo sapiens
SLARVRGQLRSLRASDLFTYKMLRYPYFCRMYKECLSCWLESGIPNLGVWPKRIHTTAEKYREYEAREQTDQTQVQELHRSQDRDFETMAKLHIPVMVDEVVHCLSPQKGQIFLDMTFGSGGHTKAILQKESDIVLYALDRDPTAYALAEHLSELYPKQIRAMLGQFSQAEALLMKAGVQPGTFDGVLMDLGCSSMQLDTPERGSSLRKDGPLDIRMDGGRNISSLCYLYTERLTTAIYLYCHQDFPGSSHICEQ

SEQ ID NO: 2418 - protein, 181 aa, Homo sapiens
GTSWASRSGMLRAGWLRGAAALALLLAARVVAAFEPITVGLAIGAASAITGYLSYNDIYCRFAECCREERPLNASALKLDLEEKLFGQHLATEVIFKALTGFRNNKNPKKPLTLSLHGWAGTGKNFVSQIVAENLHPKGLKSNFVHLFVSTLHFPHEQKIKLYQAREPAIISSAGQSDWSG

SEQ ID NO: 2419 - protein, 98 aa, Homo sapiens
RWTSNSPLGLGQFPPQTAASPDEQKVFALWESGDMSDQHRQVLLEIFSKNYRVRRNMIQSRLTQECGEDLSKQEVDKVLKDCCVSYGGMWYLKGTVQS

SEQ ID NO: 2420 - protein, 69 aa, Homo sapiens
NSFNTLTYTVMIHSCLKQEVISTWDWDFYFLRWSFVLVAQAGVQWHNPGSLQPPPPGFKQFSCLSLLSR

SEQ ID NO: 2421 - protein, 187 aa, Homo sapiens
ISLFPPPGPQLCLPDKEGQHSKSRSAIYLPVRSTNSSVRKMAGNSILLAAVSILSACQQSYFALQVGKARLKYKVTPPAVTGSPEFERVFRAQQNCVEFYPIFIITLWMAGWYFNQVFATCLGLVYIYGRHLYFWGYSEAAKKRITGFRLSLGILALLTLLGALGIANSFLDEYLDLNIAKKLRRQF

SEQ ID NO: 2422 - protein, 117 aa, Homo sapiens
  MISC_FEATURE (31): Xaa equals any of the twenty naturally occurring L-amino acids
  MISC_FEATURE (53): Xaa equals any of the twenty naturally occurring L-amino acids
  MISC_FEATURE (103): Xaa equals any of the twenty naturally occurring L-amino acids
TSSGASVVAIDNKIEQAMDLVKSHLMYAVRXEVEVLKEQIKELIEKNSQLEQXNNLLKTLASPEQLAQFQAQLQTGSPPATTQPQGTTQPPAQPASQGFRDQXLSGFGPRKMGAGFE

SEQ ID NO: 2423 - protein, 419 aa, Homo sapiens
  MISC_FEATURE (29): Xaa equals any of the twenty naturally occurring L-amino acids
  MISC_FEATURE (363): Xaa equals any of the twenty naturally occurring L-amino acids
VEISGPRPVDWEVRPPLQRLGLCFGSCRXQQSLPGRGSANLLPSVRSESAVLSDCVGGFPGRSSVRAWIAGPRCTPASPTRVLSLSWRLFNSASLLLLATSTSGSECRFPRSPRARERGIPDCERLLVRRSCWRSGDPRPAGPAGHAAGAFSTPQYLGGTAMVLLHVKRGDESQFLLQAPGSTELEELTVQVARVYNGRLKVQRLCSEMEELAEHGIFLPPNMQGLTDDQIEELKLKDEWGEKCVPSGGAVFKKDDIGRRNGQAPNEKMKQVLKKTIEEAKAIISKKQVEAGVCVTMEMVKDALDQLRGAVMIVYPMGLPPYDPIRMEFENKEDLSGTQAGLNVIKEAEAQLWWAAKELRRTXKLSDYVGKNEKTKIIAKIQQRLEENDDDAYLNSPWADNTALKRHFHGVKDIKWRPR

SEQ ID NO: 2424 - protein, 252 aa, Homo sapiens
PQGGEGSAWGLPSGSFHNWARGGRRSCPSSLVWAVPRPRLDAEPGTASCVLHGHGPFCLCFFFFSQPSLFWLPYFSVCLPVPLLPWVFLSCRPVHTLPGFLPAQGIATGKYHAAVLTNSAEWEAACVKAGRKCGDLVHPLVYCPELHFSEFTSAVADMKNSVADRDNSPSSCAGLFIASHIGFDWPGVWVHLDIAAPVHAGERATGFGVALLLALFGRASEDPLLNLVSPLGCEVDVEEGDVGRDSKRRRLV

SEQ ID NO: 2425 - protein, 270 aa, Homo sapiens
PTRPVWMSVFRYLSRRELCECMRVCKTWYKWCCDKRLWTKIDLSRCKAIVPQALSGIIKRQPVSLDLSWTNISKKQLTWLVNRLPGLKDLLLAGCSWSAVSALSTSSCPLLRTLDLRWAVGIKDPQIRDLLTPPADKPGQDNRSKLRNMTDFRLAGLDITDATLRLIIRHMPLLSRLDLSHCSHLTDQSSNLLTAVGSSTRYSLTELNMAGCNKLTDQTLIYLRRIANVTLIDLRGCKQITRKACEHFISDLSINSLYCLSDEKLIQKIS

SEQ ID NO: 2426 - protein, 134 aa, Homo sapiens
RGETREMAGNLLSGAGRRLWDWVPLACRSFSLGVPRLIGIRLTLPPPKVVDRWNEKRAMFGVYDNIGILGNFEKHPKELIRGPIWLRGWKGNELQRCIRKRKMVGSRMFADDLHNLNKRIRYLYKHFNRHGKFR

SEQ ID NO: 2427 - protein, 251 aa, Homo sapiens
RSISCPSLQQTPVPAGEEEGELGEYRQKLLMFLEISSYYDPGRLICDFPFDGLLEERALLLGRMGKHEQALFIYVHILKDTRMAEEYCHKHYDRNKDGNKDVYLSLLRMYLSPPSIHCLGPIKLELLEPKANLQAALQVLELHHSKLDTTKALNLLPANTQINDIRIFLEKVLEENAQKKRFNQVLKNLLHAEFLRVQEERILHQQVKCIITEEKVCMVCKKKIGNSAFARYPNGVVVHYFCSKEVNPADT

SEQ ID NO: 2428 - protein, 36 aa, Homo sapiens
NVRNVGPLSPSQAIASPVTCMYMPRWPEVTEESQKK

SEQ ID NO: 2429 - protein, 83 aa, Homo sapiens
KVGKGHEQALFKRRHTCSQKAYEKKLNIIVIREMQIKTTMRYHLTPVRMATIKRSKNGRCWRGCEEKLTLIHCRWEYTLVKLL

SEQ ID NO: 2430 - protein, 116 aa, Homo sapiens
  MISC_FEATURE (93): Xaa equals any of the twenty naturally occurring L-amino acids
  MISC_FEATURE (105): Xaa equals any of the twenty naturally occurring L-amino acids
  MISC_FEATURE (108): Xaa equals any of the twenty naturally occurring L-amino acids
VFVFPNIPKHRKSRERWLTCVIPAFWEGEAGESFEPMSLRPVWATWGDPISVKNLTKKKKRCSKNSVLLYYGTTIICVVHLLTETSSWRHMTXFVYLEIFFGLKXIFXYECAFTML

SEQ ID NO: 2431 - protein, 207 aa, Homo sapiens
QMDESFRELDMECALLDGEQKSETTELMKEKEILDHLNRKIAELEKNIVGEKTKDADLLDVESKHFEDLEFQQLEHESRLDEEKENLTQQLLREVAEYQRNIVSRKEKISALKKQANHIVQQAQREQDHFVKEKNNLIMMLQREKENLCNLEKKYSSLSGGKGFPVNPNTLKEGYISVNEINEPCGNSTESIPFHSVSCWMLDAVAT

SEQ ID NO: 2432 - protein, 45 aa, Homo sapiens
  MISC_FEATURE (17): Xaa equals any of the twenty naturally occurring L-amino acids
KVFIFKDDVVWGGHIIXFADLALRCLVETYAASFEERNEEPLPNA

SEQ ID NO: 2433 - protein, 99 aa, Homo sapiens
  MISC_FEATURE (47): Xaa equals any of the twenty naturally occurring L-amino acids
CELHATVMNTLFRKDPNAEGRYNLYTAEGKYIFKERESFDGRNILKXFALLPRLEYNDAISAHCNLCLPGSSDSPASASQVAGITGVSDAYSQSLPGKS

SEQ ID NO: 2434 - protein, 95 aa, Homo sapiens
SKCVHTMDEEEKDDGEAKEISTPTHWSKLDPKTMKVNDLRKELESRALSSKGLKSQLIARLTKQLKVEEQKEEQKELEKSEKEEDEDDDRKSEDD

SEQ ID NO: 2435 - protein, 120 aa, Homo sapiens
  MISC_FEATURE (25): Xaa equals any of the twenty naturally occurring L-amino acids
  MISC_FEATURE (26): Xaa equals any of the twenty naturally occurring L-amino acids
CREVRSRASIAVAPFDHDSLYLGAXXSLPGDPASCSVLGSLNLHLYRDPALLGLRCPLYPSFPEEAALEAEAELGGQPSLTAEDSEISSQCPSASGSSGSDSSCVSGQALGRGLEDLPCV

SEQ ID NO: 2436 - protein, 378 aa, Homo sapiens
SNSHNALKLRFPAEDEFPDLSAHNNHMAKVLTPELYAELRAKSTPSGFTLDDVIQTGVDNPGHPYIMTVGCVAGDEESYEVFKDLFDPIIEDRHGGYKPSDEHKTDLNPDNLQGGDDLDPNYVLSSRVRTGRSIRGFCLPPHCSRGERRAIEKLAVEALSSLDGDLAGRYYALKSMTEAEQQQLIDDHFLFDKPVSPLLLASGMARDWPDARGIWHNDNKTFLVWVNEEDHLRVISMQKGGNMKEVFTRFCTGLTQIETLFKSKDYEFMWNPHLGYILTCPSNLGTGLRAGVHIKLPNLGKHEKFSEVLKRLRLQKRGTGGVDTAAVGGVFDVSNADRLGFSEVELVQMVVDGVKLLIEMEQRLEQGQAIDDLMPAQK

SEQ ID NO: 2437 - protein, 66 aa, Homo sapiens
NWRMRTRHVMLPKDIAKLVPKTHLMSESEWRNLGVQQSQGWVHYMIHEPEPHILLFRRPLPKKPKK

SEQ ID NO: 2438 - protein, 177 aa, Homo sapiens
  MISC_FEATURE (22): Xaa equals any of the twenty naturally occurring L-amino acids
PTRPRSASGKMAAAGAGRLRRXASALLLRSPRLPARELSAPARLYHKKVVDHYENPRNVGSLDKTSKNVGTGLVGAPACGDVMKLQIQVDEKGKIVDARFKTFGCGSAIASSSLATEWVKGKTVEEALTIKNTDIAKELCLPPVKLHCSMLAEDAIKAALADYKLKQEPKKGEAEKK

SEQ ID NO: 2439 - protein, 96 aa, Homo sapiens
  MISC_FEATURE (3): Xaa equals any of the twenty naturally occurring L-amino acids
ARXGVGLRGLSSLQAPQPSRVPWPMAAYSYRPGPGAGPGPAAGAALPDQSFLWNVFQRVDKDRSGVISDTELQQALSNGEWASGNGVSGPRSRVAW

SEQ ID NO: 2440 - protein, 165 aa, Homo sapiens
KVACRYRSGIPGSTHASGGADRMGKCRGLRTARKLRSHRRDQKWHDKQYKKAHLGTALKANPFGGASHAKGIVLEKVGVEAKQPNSAIRKCVRVQLIKNGKKITAFVPNDGCLNFIEENDEVLVAGFGRKGHAVGDIPGVRFKVVKVANVSLLALYKGKKERPRS

SEQ ID NO: 2441 - protein, 135 aa, Homo sapiens
  MISC_FEATURE (39): Xaa equals any of the twenty naturally occurring L-amino acids
  MISC_FEATURE (120): Xaa equals any of the twenty naturally occurring L-amino acids
  MISC_FEATURE (131): Xaa equals any of the twenty naturally occurring L-amino acids
GSTHASGEREIVMAAAILAEKVPVDSAEEREQPLASARXLAAQKREQRLRKFRELHLKRNEARKLNHQEVVEEDKRLKLPANWEARKARLEWELQEEEKKKECAARREDYEKVNCWSSWXKMQKVGRGRRXGKTP

SEQ ID NO: 2442 - protein, 391 aa, Homo sapiens
  MISC_FEATURE (44): Xaa equals any of the twenty naturally occurring L-amino acids
  MISC_FEATURE (49): Xaa equals any of the twenty naturally occurring L-amino acids
  MISC_FEATURE (50): Xaa equals any of the twenty naturally occurring L-amino acids
  MISC_FEATURE (51): Xaa equals any of the twenty naturally occurring L-amino acids
  MISC_FEATURE (52): Xaa equals any of the twenty naturally occurring L-amino acids
  MISC_FEATURE (62): Xaa equals any of the twenty naturally occurring L-amino acids
  MISC_FEATURE (63): Xaa equals any of the twenty naturally occurring L-amino acids
  MISC_FEATURE (65): Xaa equals any of the twenty naturally occurring L-amino acids
  MISC_FEATURE (66): Xaa equals any of the twenty naturally occurring L-amino acids
  MISC_FEATURE (71): Xaa equals any of the twenty naturally occurring L-amino acids
  MISC_FEATURE (72): Xaa equals any of the twenty naturally occurring L-amino acids
  MISC_FEATURE (74): Xaa equals any of the twenty naturally occurring L-amino acids
  MISC_FEATURE (77): Xaa equals any of the twenty naturally occurring L-amino acids
  MISC_FEATURE (84): Xaa equals any of the twenty naturally occurring L-amino acids
  MISC_FEATURE (87): Xaa equals any of the twenty naturally occurring L-amino acids
DPRVRKRGRKFRNCGAGASIFSSFHSGRGLVAAGRTAGVPDGGXAGGGXXXXHGRGRPDPEXXYXXELSPXXPXAGXEDPSRPXHAXPEAQHLSGLEMIRDLCDGQLEGAEIGSTEITFTPEKIKGGIHTADTKTAGSVCLLMQVSMPCVLFAASPSELHLKGGTNAEMAPQIDYTVMVFKPIVEKFGFIFNCDIKTRGYYPKGGGEVIVRMSPVKQLNPINLTERGCVTKIYGRAFVAGVLPFKVAKDMAAAAVRCIRKEIRDLYVNIQPVQEPKDQAFGNGNGIIIIAETSTGCLFAGSSLGKRGVNADKVGIEAAEMLLANLRHGGTVDEYLQDQLIVFMALANGVSRIKTGPVTLHTQTAIHFAEQIAKAKFIVKKSEKKKKKRRPQ

SEQ ID NO: 2443 - protein, 437 aa, Homo sapiens
  MISC_FEATURE (264): Xaa equals any of the twenty naturally occurring L-amino acids
  MISC_FEATURE (271): Xaa equals any of the twenty naturally occurring L-amino acids
  MISC_FEATURE (343): Xaa equals any of the twenty naturally occurring L-amino acids
  MISC_FEATURE (406): Xaa equals any of the twenty naturally occurring L-amino acids
GGCCREAARARRAEPMLDLEVVPERSLGNEQWEFTLGMPLAQAVAILQKHCRIIKNVQVLYSEQSPLSHDLILNLTQDGIKLMFDAFNQRLKVIEVCDLTKVKLKYCGVHFNSQAIAPTIEQIDQSFGATHPGVYNSAEQLFHLNFRGLSFSFQLDSWTEAPKYEPNFAHGLASLQIPHGATVKRMYIYSGNSLQDTKAPMMPLSCFLGNVYAESVDVLRDGTGPAGLRLRLLAAGCGPGLLADAKMRVFERSVYFGDSCQDVXSMLGSPXKVFYKSEDKMKIHSPSPHKQVPSKCNDYFFNYFTLGVDILFDANTHKVKKFVLHTNYPGHYNFNIYHRCEFXIPLAIKKENADGQTETCTTYSKWDNIQELLGHPVEKPVVLHRSSSPNNTNPFGSTFCFGLQRXIFEVMQNNHIASVTLYGPPRPGSHLRTAELP

SEQ ID NO: 2444 - protein, 345 aa, Homo sapiens
LPVRAEPTRAAAMSGDEMIFDPTMSKKKKKKKKPFMLDEEGDTQTEETQPSETKEVEPEPTEDKDLEADEEDTRKKDASDDLDDLNFFNQKKKKKKTKKIFDIDEAEEGVKDLKIESDVQEPTEPEDDLDIMLGNKKKKKKNVKFPDEDEILEKDEALEDEDNKKDDGISFSNQTGPAWAGSERDYTYEELLNRVFNIMREKNPDMVAGEKRKFVMKPPQVVRVGTKKTSFVNFTDICKLLHRQPKHLLAFLLAELGTSGSIDGNNQLVIKGRFQQKQIENVLRRYIKEYVTCHTCRSPDTILQKDTRLYFLQCETCHSRCSVASIKTGFQAVTGKRAQLRAKAN

SEQ ID NO: 2445 - protein, 173 aa, Homo sapiens
ARACLSANAARMASQNRDPAARGPVGKRLQQELMTLMMSGDKGISAFPESDNLFKWVGTIHGAAGTVYEDLRYKLSLEFPSGYPYNAPTVKFLTPCYHPNVDTQGNICLDILKEKWSALYDVRTILLSIQSLLGEPNIDSPLNTHAAELWKNPTAFKKYLQETYSKQVTSQEP

SEQ ID NO: 2446 - protein, 334 aa, Homo sapiens
  MISC_FEATURE (10): Xaa equals any of the twenty naturally occurring L-amino acids
YLGDTIEGTXAGTGPEFPGRPTRPMAAEDELQLPRLPELFETGRQLLDEVEVATEPAGSRIVQEKVFKGLDLLEKAAEMLSQLDLFSRNEDLEEIASTDLKYLLVPAFQGALTMKQVNPSKRLDHLQRAREHFINYLTQCHCYHVAEFELPKTMNNSAENHTANSSMAYPSLVAMASQRQAKIQRYKQKKELEHRLSAMKSAVESGQADDERVREYYLLHLQRWIDISLEEIESIDQEIKILRERDSSREASTSNSSRQERPPVKPFILTRNMAQAKVFGAGYPSLPTMTVSDWYEQHRKYGALPDQGIAKAAPEEFRKAAQQQEDQPMFCRFP

SEQ ID NO: 2447 - protein, 279 aa, Homo sapiens
FFFFFFFFFSATVTKMEAFLGSRSGLWAGGPAPGQFYRIPSTPDSFMDPASALYRGPITRTQNPMVTGTSVLGVKFEGGVVIAADMLGSYGSLARFRNISRIMRVNNSTMLGASGDYADFQYLKQVLGQMVIDEELLGDGHSYSPRAIHSWLTRAMYSRRSKMNPLWNTMVIGGYADGESFLGYVDMLGVAYEAPSLATGYGAYLAQPLLREVLEKQPVLSQTEARDLVERCMRVLYYRDARSYNRFQIATVTEKGVEIEGPLSTETNWDIAHMISGFE

SEQ ID NO: 2448 - protein, 254 aa, Homo sapiens
GAPRSPRGRCGGTRAEAAAATWAAAGPRRRAVRMSGWADERGGEGDGRIYVGNLPTDVREKDLEDLFYKYGRIREIELKNRHGLVPFAFVRFEDPRDAEDAIYGRNGYDYGQCRLRVEFPRTYGGRGGWPRGGRNGPPTRRSDFRVLVSGLPPSGSWQDLKDHMREAGDVCYADVQKDGVGMVEYLRKEDMEYALRKLDDTKFRSHEGETSYIRVYPERSTSYGYSRSRSGSRGRDSPYQSRGSPHYFSPFRPY

SEQ ID NO: 2449 - protein, 73 aa, Homo sapiens
  MISC_FEATURE (13): Xaa equals any of the twenty naturally occurring L-amino acids
  MISC_FEATURE (16): Xaa equals any of the twenty naturally occurring L-amino acids
TQFLRKEKASAAXISXTETLSEEEQEELRRELAKVEEEIQMLQARSKHILSTCIAMNFYQMCFYLALHIPLTK

SEQ ID NO: 2450 - protein, 220 aa, Homo sapiens
GASGAAEGPAPEPGQGCAVMITETAAEPTVPAVPAAEEATEARGREEPAWPWKDAPIRTLVQRIHQLQAERAQGFRRLEEWLAPVQGLRAWGRGLRVPTCRRGHRQYLRSGPDYDFARYRSTVHGVTQAFAAASREVLAVEAELGGPRRQPLLAGHVRSLQELEQTRLGTVALLQLMETPELAGQEDAVRMQQLKMKVIKTMEAISEVLQDLRFDAESAE

SEQ ID NO: 2451 - protein, 392 aa, Homo sapiens
GAMRGDRGRGRGGRFGSRGGPGGGFRPFVPHIPFDFYLCEMAFPRVKPAPDETSFSEALLKRNQDLAPNSAEQASILSLVTKINNVIDNLIVAPGTFEVQIEEVRQVGSYKKGTMTTGHNVADLVVILKILPTLEAVAALGNKVVESLRAQDPSEVLTMLTNETGFEISSSDATVKILITTVPPNLRKLDPELHLDIKVLQSALAAIRHARWFEENASQSTVKVLIRLLKDLRIRFPGFEPLTPWILDLLGHYAVMNNPTRQPLALNVAYRRCLQILAAGLFLPGSVGITDPCESGNFRVHTVMTLEQQDMVCYTAQTLVRILSHGGFRKILGQEGDASYLASEISTWDGVIVTPSEKAYEKPPEKKEGEEEEENTEEPPQGEEEESMETQE

SEQ ID NO: 2452 - protein, 102 aa, Homo sapiens
  MISC_FEATURE (25): Xaa equals any of the twenty naturally occurring L-amino acids
RADRFSRNSGRARGGPGGGSSRAAXPAASLGRAAAMIIPVRCFTCGKIVGNKWEAYLGLLQAEYTEGDALDALGLKRYCCRRMLLAHVDLIEKLLNYAPLEK

SEQ ID NO: 2453 - protein, 74 aa, Homo sapiens
VNDTENEMAIYEFIHNFVEVLDEYFSRVSELDIMFNLDKVHIILDEMVLNGCIVETNRARILAPLLILDKMSES

SEQ ID NO: 2454 - protein, 159 aa, Homo sapiens
  MISC_FEATURE (5): Xaa equals any of the twenty naturally occurring L-amino acids
  MISC_FEATURE (9): Xaa equals any of the twenty naturally occurring L-amino acids
RYQAXSASXLKDLALPIYSIGMVLAFAFISNYSGLSSTLALALAHTGHAFTFFSPFLGWLGVFLTGSDTSSNALFAALQATAAQQIGVSDLLLVAANTTGGVTGKMISPQSIAIACAAVGLVGKESDLFRFTVKHSLIFTCIVGVITTLQAYVLTWMIP

SEQ ID NO: 2455 - protein, 234 aa, Homo sapiens
  MISC_FEATURE (209): Xaa equals any of the twenty naturally occurring L-amino acids
LSTTERMEVAVSKARAKVTMNDFDYLKLLGKGTFGKVILVREKATGRYYAMKILRKEVIIAKDEVAHTVTESRVLQNTRHPFLTALKYAFQTHDRLCFVMEYANGGELFFHLSRERVFTEERARFYGAEIVSALEYLHSRDVVYRDIKVSGRVCARLTCGMHTTWDSHWGSWAELLPSFARLPTKVQGGGCPHSPGSPPRSRVVAALIXQAPHQGPGWWLCGKLPQVGTFPSLP

SEQ ID NO: 2456 - protein, 76 aa, Homo sapiens
  MISC_FEATURE (39): Xaa equals any of the twenty naturally occurring L-amino acids
ETLREEAPTDLRVFELNSDSGKSTPSNNGKKGSSTDISXDWEKDFDLDMTEEEVQMALSKVDASGELEDVEWEDWE

SEQ ID NO: 2457 - protein, 115 aa, Homo sapiens
  MISC_FEATURE (96): Xaa equals any of the twenty naturally occurring L-amino acids
  MISC_FEATURE (105): Xaa equals any of the twenty naturally occurring L-amino acids
  MISC_FEATURE (106): Xaa equals any of the twenty naturally occurring L-amino acids
  MISC_FEATURE (107): Xaa equals any of the twenty naturally occurring L-amino acids
  MISC_FEATURE (109): Xaa equals any of the twenty naturally occurring L-amino acids
IRRYSLDQKGSFGYFNLLVCPAMWMRSDYMWKFIVLSFYSIHLKRLDLCRPFPFVLYCRYSREAYVELVHHIRESIPGVSLSSDFIAGFCGETEEXHVQTVSLLXXXSXTTWAFL

SEQ ID NO: 2458 - protein, 172 aa, Homo sapiens
KRVEDESLDNTWLNRTDTMIQTPGPLPAPQLTSTVLRENSRPMGDQIQEPESEHGSEPDFLHNPQMQISWLGQPKLEDLNRKDRTGMNYMKVRTGVRHAVRGLMEEDAEPIFEDVMMSSRSQLEDMNEEFEDTMVIDLPPSRNRRERAELRPDFFDSAAIIEDDSGFGMPMF

SEQ ID NO: 2459 - protein, 170 aa, Homo sapiens
  MISC_FEATURE (5): Xaa equals any of the twenty naturally occurring L-amino acids
CNWHXTVFLLSPSLKPYSQGCNKDSVRAGCKKCGYPGHLTFECRNFLRVDPKRDIVLDVSSTSSEDSDEENEELNKLQALQEKRINEEEEKKKEKSKEKIKLKKKRKRSYSSSSTEEDTSKQKKQKYQKKEKKKEKKSKSKKGKHHKKEKKKRKKEKHSSTPNSSEFSRK

SEQ ID NO: 2460 - protein, 46 aa, Homo sapiens
KLEEEKGKKEKERQEIEKERRERERERERERERRERERERERERER

SEQ ID NO: 2461 - protein, 240 aa, Homo sapiens
RLVCCLPKRRRSLVLRKMSKVFHLTCHVPTLLSFPSGDWICTFCRDIGKPEVEYDCDNLQHSKKGKTAQGLSPVDQRKCERLLLYLYCHELSIEFQEPVPASIPNYYKIIKKPMDLSTVKKKLQKKHSQHYQIPDDFVADVRLIFKNCERFNEMMKVVQVYADTQEINLKADSEVAQAGKAVALYFEDKLTEIYSDRTFAPLPEFEQEEDDGEVTEDSDEDFIQPRRKRLKSDERPVHIK

SEQ ID NO: 2462 - protein, 50 aa, Homo sapiens
LALLAQVPFAPSGLKVRYLKVFEPKLNYSDHDVIKWVRYIGRSGIYETRC

SEQ ID NO: 2463 - protein, 115 aa, Homo sapiens
GAGGVGRFEAIRGEGVKRRGSESEKAVATQPPRFEAIRAPARMIEVVCNDRLGKKVRVKCNTDDTIGDLKKLIAAQTGTRWNKIVLKKWYTIFKDHVSLGDYEIHDGMNLELYYQ

SEQ ID NO: 2464 - protein, 315 aa, Homo sapiens
PRPWILEDLTMGRPRPRAAKTWMFLLLLGGAWAACGSLDLLTKLYAENLPCVHLNPQWPSQPSHCPRGWRSNPLPPAAGHSRAQEDKVLGGHECQPHSQPWQAALFQGQQLLCGGVLVGGNWVLTAAHCKKPKYTVRLGDHSLQNKDGPEQEIPVVQSIPHPCYNSSDVEDHNHDLMLLQLRDQASLGSKVKPISLADHCTQPGQKCTVSGWGTVTSPRENFPDTLNCAEVKIFPQKKCEDAYPGQITDGMVCAGSSKGADTCQGDSGGPLVCDGALQGITSWGSDPCGRSDKPGVYTNICRYLDWIKKIIGSKG

SEQ ID NO: 2465 - protein, 221 aa, Homo sapiens
  MISC_FEATURE (2): Xaa equals any of the twenty naturally occurring L-amino acids
  MISC_FEATURE (6): Xaa equals any of the twenty naturally occurring L-amino acids
  MISC_FEATURE (7): Xaa equals any of the twenty naturally occurring L-amino acids
SXDSHXXIPGSTHASAKTYDYLFKLLLIGDSGVGKTCVLFRFSEDAFNSTFISTIGIDFKIRTIELDGKRIKLQIWDTAGQERFRTITTAYYRGAMGIMLVYDITNEKSFDNIRNWIRNIEEHASADVEKMILGNKCDVNDKRQVSKERGEKLALDYGIKFMETSAKANINVENAFFTLARDIKAKMDKKLEGNSPQGSNQGVKITPDQQKRSSFFRCVLL

SEQ ID NO: 2466 - protein, 224 aa, Homo sapiens
  MISC_FEATURE (128): Xaa equals any of the twenty naturally occurring L-amino acids
  MISC_FEATURE (153): Xaa equals any of the twenty naturally occurring L-amino acids
APERGKAPGKRSSSPWPTRAGNSTPRMQFVSTRPQPQQLGIQGLGLDSGSWSWAQALPPEEVCHQEPALRGEMAEGMPPMQAQEWDMDARRPMPFQFPPFPDRAPVFPDRMMREPQLPTAEISLWTVXAAIQAVERKVDAQASQLLNLEGRTXPAPGVPGSREQIGYGTPQVVHSEGSFSMGAPGAASAPACPQPLNLVQQHLVTAQQWPGPPQAVRAPGQTSP

SEQ ID NO: 2467 - protein, 189 aa, Homo sapiens
  MISC_FEATURE (167): Xaa equals any of the twenty naturally occurring L-amino acids
  MISC_FEATURE (177): Xaa equals any of the twenty naturally occurring L-amino acids
  MISC_FEATURE (184): Xaa equals any of the twenty naturally occurring L-amino acids
  MISC_FEATURE (186): Xaa equals any of the twenty naturally occurring L-amino acids
LSNLKVLNHSPMSDASVNFDYKSPSPFDCSTDQEEKIEDVASHCLPQKDLYTAEEEAATLFPRKMTSHNGMEDSGGGGTGVKKKRKKKEPGDQEGAAKGSKDREPKPKRKREPKEPKEPRKAKEPKKAKEHKEPKQKDGAKKARKPREASGTKEAKEKRSCTDSAAXTKSRKASKEXGPTPVEXKXKKK

SEQ ID NO: 2468 - protein, 492 aa, Homo sapiens
GKMKPKLMYQELKVPAEEPANELPMNEIEAWKAAEKKARWVLLVLILAVVGFGALMTQLFLWEYGDLHLFGPNQRPAPCYDPCEAVLVESIPEGLDFPNASTGNPSTSQAWLGLLAGAHSSLDIASFYWTLTNNDTHTQEPSAQQGEEVLRQLQTLAPKGVNVRIAVSKPSGPQPQADLQALLQSGAQVRMVDMQKLTHGVLHTKFWVVDQTHFYLGSANMDWRSLTQVKELGVVMYNCSCLARDLTKIFEAYWFLGQAGSSIPSTWPRFYDTRYNQETPMEICLNGTPALAYLASAPPPLCPSGRTPDLKALLNVVDNARSFIYVAVMNYLPTLEFSHPHRFWPAIDDGLRRATYERGVKVRLLISCWGHSEPSMRAFLLSLAALRDNHTHSDIQVKLFVVPADEAQARIPYARVNHNKYMVTERATYIGTSNWSGNYFTETAGTSLLVTQNGRGGLRSQLEAIFLRDWDSPYSHDLDTSADSVGNACRLL

SEQ ID NO: 2469 - protein, 226 aa, Homo sapiens
RAKAIPEIYLTRLLSMKGTLQKFVDDLFQVILSTSRPVPLAVKYFFDLLDEQAQQHGISDQDTIHIWKTNSLPLRFWINIIKNPQFVFDVQTSDNMDAVLLVIAQTFMDACTLADHKLGRDSPINKLLYARDIPRYKRMVERYYADIRQTVPASDQEMNSVLAELSWNYSGDLGARVALHELYKYINKYYDQIITALEEDGTAQKMQLGYRLQQIAAAVENKVTDL

SEQ ID NO: 2470 - protein, 158 aa, Homo sapiens
  MISC_FEATURE (158): Xaa equals any of the twenty naturally occurring L-amino acids
PPPPPPPELCSMASRRMETKPVITCLKTLLIIYSFVFWITGVILLAVGVWGKLTLGTYISLIAENSTNAPYVLIGTGTTIVVFGLFGCFATCRGSPWMLKLYAMFLSLVFLAELVAGISGFVFRHEIKDTFLRTYTDAMQTYNGNDERSRAVDHVQRX

SEQ ID NO: 2471 - protein, 506 aa, Homo sapiens
  MISC_FEATURE (216): Xaa equals any of the twenty naturally occurring L-amino acids
  MISC_FEATURE (323): Xaa equals any of the twenty naturally occurring L-amino acids
  MISC_FEATURE (430): Xaa equals any of the twenty naturally occurring L-amino acids
PLSCLADTCTVYRNSVPGSCQETGKKVISMKRSSVSSGGAGRLSMQELRSQDVNKQGLYTPQTKEKPTFGKLSINKPTSERKVSLFGKRTSGHGSRNSQLGIFSSSEKIKDPRPLNDKAFIQQCIRQLCEFLTENGYAHNVSMKSLQAPSVKDFLKIFTFLYGFLCPSYELPDTKFEEEVPRIFKDLGYPFALSKSSMYTVGAPHTWPHIVAALVXLIDCIKIHTAMKESSPLFDDGQPWGEETEDGIMHNKLFLDYTIKCYESFMSGADSFDEMNAELQSKLKDLFNVDAFKLESLEAKNRALNEQIARLEQEREKEPNRLXSLRKLKASLQGDVQKYQAYMSNLESHSAILDQKLNGLNEEIARVELECETIKQDNTRLQNIIDNQKYSVADIERINHERNELQQTINKLTKDLEAEQQKLWNEELKXARGKEAIETQLAEYHKLARKLKLIPKGAENSKGYDFEIKFNPEAGANCLVKYRAQVYVPLKELLNETEEEINKALN

SEQ ID NO: 2472 - protein, 38 aa, Homo sapiens
LFLLASSALCWKVRQRSKKAKRRESQTALVANQRSLFA

SEQ ID NO: 2473 - protein, 234 aa, Homo sapiens
  MISC_FEATURE (227): Xaa equals any of the twenty naturally occurring L-amino acids
  MISC_FEATURE (230): Xaa equals any of the twenty naturally occurring L-amino acids
EAGRSGKQRARGRVHGPAAAAVAAAPTMSAAKENPCRKFQANIFNKSKCQNCFKPRESHLLNDEDLTQAKPIYGGWLLLAPDGTDFDNPVHRSRKWQRRFFILYEHGLLRYALDEMPTTLPQGTINMNQCTDVVDGEGRTGQKFSLCILTPEKEHFIRAETKEIVSGWLEMLMVYPRTNKQNQKKKRKVEPPTPQEPGPAKWLLPAAAAAAAAAAASPVLRKSPPPXPHXGRKK

SEQ ID NO: 2474 - protein, 249 aa, Homo sapiens
  MISC_FEATURE (230): Xaa equals any of the twenty naturally occurring L-amino acids
GGFEIQEESKQFVARYGKVSAGEIAVTGAGRLPCKQIIHAVGPRWMEWDKQGCTGKLQRAIVSILNYVIYKNTHIKTVAIPALSSGIFQFPLNLCTKTIVETIRVSLQGKPMMSNLKEIHLVSNEDPTVAAFKAASEFILGKSELGQETTPSFNAMVVNNLTLQIVQGHIEWQTADVIVNSVNPHDITVGPVAKSILQQAGVEMKSEFLATKAKQFNGPSWYWSQKDLTXSVNIYTMYCGIQNFLNLRY

SEQ ID NO: 2475 - protein, 166 aa, Homo sapiens
  MISC_FEATURE (19): Xaa equals any of the twenty naturally occurring L-amino acids
AEKVYGAAIQFYEPYSEEXLTEKQRLLLGLTSADGKSDSSKTIHTNKCICLLSHWPFFDAFRKFLTFLYRYSISGPHVLPIEKHISHFMHKVPFPSPQRPRILVQLSPHDNLILSQPVSSPLPLSGGKFSTLLQNLGPENAVTLLVFAVTEHKILIHSYGHPCLLV

SEQ ID NO: 2476 - protein, 100 aa, Homo sapiens
  MISC_FEATURE (2): Xaa equals any of the twenty naturally occurring L-amino acids
  MISC_FEATURE (70): Xaa equals any of the twenty naturally occurring L-amino acids
  MISC_FEATURE (71): Xaa equals any of the twenty naturally occurring L-amino acids
EXSHVWKVNHKIAEIIRSFKGHVRKMLRHAERSAIVEYAYNDKAILEQRNMLTEELYGNTFQLYKSADHXXLDKVLEVQPEKLELIMDEMKQILTPMAQK

SEQ ID NO: 2477 - protein, 284 aa, Homo sapiens
ISLPLSGIICYYMNWTYVFYFFGTIGIFWFLLWIWLVSDTPQKHKRISHYEKEYILSSLRNQLSSQKSVPWVPILKSLPLWAIVVAHFSYNWTFYTLLTLLPTYMKEILRFNVQENGFLSSLPYLGSWLCMILSGQAADNLRAKWNFSTLCVRRIFSLIGMIGPAVFLVAAGFIGCDYSLAVAFLTISTTLGGFCSSGFSINHLDIAPSYAGILLGITNTFATIPGMVGPVIAKSLTPDNTVGEWQTVFYIAAAINVFGAIFFTLFAKGEVQNWALNDHHGHRH

SEQ ID NO: 2478 - protein, 199 aa, Homo sapiens
  MISC_FEATURE (78): Xaa equals any of the twenty naturally occurring L-amino acids
  MISC_FEATURE (157): Xaa equals any of the twenty naturally occurring L-amino acids
  MISC_FEATURE (163): Xaa equals any of the twenty naturally occurring L-amino acids
  MISC_FEATURE (180): Xaa equals any of the twenty naturally occurring L-amino acids
  MISC_FEATURE (182): Xaa equals any of the twenty naturally occurring L-amino acids
  MISC_FEATURE (183): Xaa equals any of the twenty naturally occurring L-amino acids
  MISC_FEATURE (185): Xaa equals any of the twenty naturally occurring L-amino acids
  MISC_FEATURE (189): Xaa equals any of the twenty naturally occurring L-amino acids
  MISC_FEATURE (190): Xaa equals any of the twenty naturally occurring L-amino acids
  MISC_FEATURE (196): Xaa equals any of the twenty naturally occurring L-amino acids
YGLQDDNIKHQLETTDEDDDDTNQSVSSIEDDFVTAFEHLEEEETSKPYNDGMNITVLRSQCDAASQTVTGHHLETHXLKILISSGQQKSLAKPSTSSVNVLGHKELPSVKTSVTTSISEPWTQRSFYRSSNASDKDSDLQKTFFSSSPAYSSESEXSSPSPXIFLDEEGYQKSLKAKLXLXXIXGMKXXFEGFPXSGR

SEQ ID NO: 2479 - protein, 220 aa, Homo sapiens
GPEGSRGDRWGTREAGAGRRCSHGGARPAGLGNEGLGLGGDPDHTDTGSRSKQRINNWKESKHKVIMASASARGNQDKDAHFPPPSKQSLLFCPKSKLHIHRAEISKIMRECQEESFWKRALPFSLVSMLVTQGLVYQGYLAANSRFGSLPKVALAGLLGFGLGKVSYIGVCQSKFHFFEDQLRGAGFGPQHNRHCLLTCEECKIKHGLSEKGDSQPSAS

SEQ ID NO: 2480 - protein, 222 aa, Homo sapiens
SGRGGGAQAAARVNRGGGPIRNRPAIARGAAGGGGRNRPAPYSRPKQLPDKWQHDLFDSGFGGGAGVETGGKLLVSNLDFGVSDADIQELFAEFGTLKKAAVHYDRSGRSLGTADVHFERKADALKAMKQYNGVPLDGRPMNIQLVTSQIDAQRRPAQSVNRGGMTRNRGAGGFGGGGGTRRGTRGGARGRGRGAGRNSKQQLSAEELDAQLDAYNARMDTS

SEQ ID NO: 2481 - protein, 47 aa, Homo sapiens
  MISC_FEATURE (31): Xaa equals any of the twenty naturally occurring L-amino acids
TDVSSDLRKEIENHYKLLCLKTSITLEFCEXLDPENPLIHFHKPGLD

SEQ ID NO: 2482 - protein, 194 aa, Homo sapiens
  MISC_FEATURE (112): Xaa equals any of the twenty naturally occurring L-amino acids
WIPGLQEFGTSIFASTGARAVAHSPQPTAMGWDLTVKMLAGNEFQVSLSSSMSVSELKAQITQKIGVHAFQQRLAVHPSGVALQDRVPLASQGLGPGSTVLLVVDKCDEPLXILVRNNKGRSSTYEVRLTQTVAHLKQQVSGLEGVQDDLFWLTFEGKPLEDQLPLGEYGLKPLSTVFMNLRLRGGGTEPGGRS

SEQ ID NO: 2483 - protein, 105 aa, Homo sapiens
  MISC_FEATURE (41): Xaa equals any of the twenty naturally occurring L-amino acids
  MISC_FEATURE (44): Xaa equals any of the twenty naturally occurring L-amino acids
  MISC_FEATURE (86): Xaa equals any of the twenty naturally occurring L-amino acids
  MISC_FEATURE (101): Xaa equals any of the twenty naturally occurring L-amino acids
  MISC_FEATURE (102): Xaa equals any of the twenty naturally occurring L-amino acids
  MISC_FEATURE (104): Xaa equals any of the twenty naturally occurring L-amino acids
GTPFKTRQQLFIDGSSQVIEGKKHNGYSVVDGEAVAEVESXRLXNNRSAQTCELFAINQALEHLQNQEGTIYTNSKYAFRVAHTFXKIWTKRSLISSKGQXXVXS

SEQ ID NO: 2484 - protein, 160 aa, Homo sapiens
WIPRAAGIRQRGGRTMPGVTVKDVNQQEFVRALAAFLKKSGKLKVPEWVDTVKLAKHKELAPYDENWFYTRAASTARHLYLRGGAGVGSMTKIYGGRQRNGVMPSHFSRGSKSVARRVLQALEGLKMVEKDQDGGRKLTPQGQRDLDRIAGQVAAANKKH

SEQ ID NO: 2485 - protein, 233 aa, Homo sapiens
  MISC_FEATURE (3): Xaa equals any of the twenty naturally occurring L-amino acids
RAXKAAPRRALARLVLAWCRWLVSATCVGTADRKMSSGNAKIGHPAPNFKATAVMPDGQFKDISLSDYKGKYVVFFFYPLDFTFVCPTEIIAFSDRAEEFKKLNCQVIGASVDSHFCHLAWVNTPKKQGGLGPMNIPLVSDPKRTIAQDYGVLKADEGISFRGLFIIDDKGILRQITVNDLPVGRSVDETLRLVQAFQFTDKHGEVCPAGWKPGSDTIKPDVQKSKEYFSKQK

SEQ ID NO: 2486 - protein, 135 aa, Homo sapiens
  MISC_FEATURE (110): Xaa equals any of the twenty naturally occurring L-amino acids
  MISC_FEATURE (118): Xaa equals any of the twenty naturally occurring L-amino acids
DERKVKKAYRQKALSCHPDKNPDNPRAAELFHQLSQALEVLTDAAARAAYDKVRKAKKQAAERTQKLDEKRKKVKLDLEARERQAQAQESEEEEESRSTRTLEQEIERLXEEGSRQLXEQQRLIRSRYARSVTRG

SEQ ID NO: 2487 - protein, 213 aa, Homo sapiens
PRVRHNHLQHYDMLKDMWVSLAPMPTPRYAATSFLRGSKIYVLGGRQSKYAVNAFEVFDIETRSWTKFPNIPYKRAFSSFVTLDNHLYSLGGLRQGRLYRQPKFLRTMDVFDMEQGGWLKMERSFFLKKRRADFVAGSLSGRVIVAGGLGNQPTVLETAEAFHPGKNKWEILPAMPTPRCACSSIVVKNCLLAVGGVNQGLSDAVEALCVSDS

SEQ ID NO: 2488 - protein, 347 aa, Homo sapiens
  MISC_FEATURE (93): Xaa equals any of the twenty naturally occurring L-amino acids
  MISC_FEATURE (229): Xaa equals any of the twenty naturally occurring L-amino acids
  MISC_FEATURE (292): Xaa equals any of the twenty naturally occurring L-amino acids
STHASDYFDYWGQGTLVTVSSASTKGPSVFPLAPCSRSTSESTAALGCLVKDYFPEPVTVSWNSGALTSGVHTFPAVLQSSGLYSLSSVVTVXSSNFGTQTYTCNVDHKPSNTKVDKTVERKCCVECPPCPAPPVAGPSVFLFPPKPKDTLMISRTPEVTCVVVDVSHEDPEVQFNWYVDGMEVHNAKTKPREEQFNSTFRVVSVLTVVHQDWLNGKEYKCKVSNKGLXAPIEKTISKTKGQPREPQVYTLPPSREEMTKNQVSLTCLVKGFYPSDIAVEWESNGQPENNYXTTPPMLDSDGSFFLYSKLTVDKSRWQQGNVFSCSVMHEALHNHYTQKSLSLSPGK

SEQ ID NO: 2489 - protein, 113 aa, Homo sapiens
  MISC_FEATURE (36): Xaa equals any of the twenty naturally occurring L-amino acids
ATTPGHYSSFSVFLSSACGCHSRRHPQAGSAEGHLXMTGDHDGRTDGQGGGGERPLMLSVSQGGGCRFLRYNCSIRAPRKGWTLMHPGRLTHYHEGLPTTRGTRYIAVSFVDP

SEQ ID NO: 2490 - protein, 118 aa, Homo sapiens
STGQSSMVRDWVMLSLSNFTQRAPVAMATWSLSCFFVSASTSPWVAAILPHVISRMGKLEQVDVNLFCLVATDFYRHQIEEELDRRAFQSVLEVVAAPGSPYHRLLTCLRNVHKVTTC

SEQ ID NO: 2491 - protein, 95 aa, Homo sapiens
NSTMAYRGQGQKVQKVMVQPINLIFRYLQNRSRIQVWLYEQVNMRIEGCIIGFDEYMNLVLDDAEEIHSKTKSRKQLGRIMLKGDNITLLQSVSN

SEQ ID NO: 2492 - protein, 399 aa, Homo sapiens
  MISC_FEATURE (397): Xaa equals any of the twenty naturally occurring L-amino acids
ISTGTLVSKREVELEKNTKEEEDLRKRNRERNIEAGKDDGLTDAQQQFSVKETNFSEGNLKLKIGLQAKRTKKPPKNLENYVCRPAIKTTIKHPRKALKSGKMTDEKNEHCPSKRDPSKLYKKADDVAAIECQSEEVIRLHSQGENNPLSKKLSPVHSEMADYINATPSTLLGSRDPDLKDRALLNGGTSVTEKLAQLIATCPPSKSSKTKPKKLGTGTTAGLVSKDLIRKAGVGSVAGIIHKDLIKKPTISTAVGLVTKDPGKKPVFNAAVGLVNKDSVKKLGTGTTAVFINKNLGKKPGTITTVGLLSKDSGKKLGIGIVPGLVHKESGKKLGLGTVVGLVNKDLGKKLGSTVGLVAKDCAKKIVASSAMGLVNKDIGKKLMSCPLAGLISKDAXKP

SEQ ID NO: 2493 - protein, 269 aa, Homo sapiens
  MISC_FEATURE (109): Xaa equals any of the twenty naturally occurring L-amino acids
  MISC_FEATURE (150): Xaa equals any of the twenty naturally occurring L-amino acids
  MISC_FEATURE (152): Xaa equals any of the twenty naturally occurring L-amino acids
  MISC_FEATURE (246): Xaa equals any of the twenty naturally occurring L-amino acids
LRTSLLGKSLVRPCKVPGPEIPGVRPKGPGSSIGGASAMAWIPLFLGVLAYCTGSVASYELTQPPSVSVSPGQTASITCSGDKLGDKYACWYQQKPGQSPVLVIYQDNXRPSGIPERFSGSNSGNTATLTISGTQAMDEADYYCQAWDSXTXVFGGGTKLTVLGQPKAAPSVTLFPPSSEELQANKATLVCLISDFYPGAVTVAWKADSSPVKAGVETTTPSKQSNNKYAASSYLSLTPEQWKSHXSYSCQVTHEGSTVEKTVAPTECS

SEQ ID NO: 2494 - protein, 40 aa, Homo sapiens
LTQGNKSWSSTAVAAALELVDPPGCRNSARGNVESKEIFF

SEQ ID NO: 2495 - protein, 454 aa, Homo sapiens
  MISC_FEATURE (202): Xaa equals any of the twenty naturally occurring L-amino acids
FLTFQQEPLFPFNLDEFVTVDEVIEEVNPSQAKQNPLKGKRKETLKNVPFSELNLKKKKGKTSTPRGVEGELSFVTLDEIGEEEDAAAHLAQALVTVDEVIDEEELNMEEMVKNSNSLFTLDELIDQDDCISHSEPKDVTVLSVAEEQDLLKQERLVTVDEIGEVEELPLNESADITFATLNTKGNEGDTVRDSIGFISSQXPEDPSTLVTVDEIQDDSSDLHLVTLDEVTEEDEDSLADFNNLKEELNFVTVDEVGEEEDGDNDLKVELAQSKNDHPTDKKGNRKKRAVDTKKTKLESLSQVGPVNENVMEEDLKTMIERHLTAKTPTKRVRIGKTLPSEKAVVTEPAKGEEAFQMSEVDEESGLKDSEPERKRKKTEDSSSGKSVASDVPEELDFLVPKAGFFCPICSLFYSGEKAMTNHCKSTRHKQNTEKFMAKQRKEKEQNEAEERSSR

SEQ ID NO: 2496 - protein, 210 aa, Homo sapiens
  MISC_FEATURE (205): Xaa equals any of the twenty naturally occurring L-amino acids
EVSTMVGSALRRGAHAYVYLVSKASHISRGHQHQAWGSRPPAAECATQRAPGSVVELLGKSYPQDDHSNLTRKVLTRVGRNLHNQQHHPLWLIKERVKEHFYKQYVGRFGTPLFSVYDNLSPVVTTWQNFDSLLIPADHPSRKKGDNYYLNRTHMLRAHTSAHQWDLLHAGLDAFLVVGDVYRRDQIDSQHYPIFHQLRPCGSSXMSIAV

SEQ ID NO: 2497 - protein, 144 aa, Homo sapiens
  MISC_FEATURE (60): Xaa equals any of the twenty naturally occurring L-amino acids
  MISC_FEATURE (61): Xaa equals any of the twenty naturally occurring L-amino acids
  MISC_FEATURE (117): Xaa equals any of the twenty naturally occurring L-amino acids
  MISC_FEATURE (121): Xaa equals any of the twenty naturally occurring L-amino acids
  MISC_FEATURE (125): Xaa equals any of the twenty naturally occurring L-amino acids
LSSWNLADAMSQKHLQINQTFEELRLVTQDTENELKKLQQTQEYFIIQYQESLRIQAQFXXLAQLSPQERLSRETALQQKQVSLEAWLQREAQTLQQYRVELAEKHQKTLQLRGSTXPFIXDDEXIQWKRRQQLAGNGGPPEGS

SEQ ID NO: 2498 - protein, 270 aa, Homo sapiens
EYRFLRRGPQGTDMAQRMTTQLLLLLVWVAVVGEAQTRIAWARTELLNVCMNAKHHKEKPGPEDKLHEQCRPWRKNACCSTNTSQEAHKDVSYLYRFNWNHCGEMAPACKRHFIQDTCLYECSPNLGPWIQQVDQSWRKERVLNVPLCKEDCEQWWEDCRTSYTCKSNWHKGWNWTSGFNKCAVGAACQPFHFYFPTPTVLCNEIWTHSYKVSNYSRGSGRCIQMWFDPAQGNPNEEVARFYAAAMSGAGPWAAWPFLLSLALMLLWLLS

SEQ ID NO: 2499 - protein, 460 aa, Homo sapiens
HYRKVRLQVPVRNSRVDPRVRITMAAGTLYTYPENWRAFKALIAAQYSGAQVRVLSAPPHFHFGQTNRTPEFLRKFPAGKVPAFEGDDGFCVFESNAIAYYVSNEELRGSTPEAAAQVVQWVSFADSDIVPPASTWVFPTLGIMHHNKQATENAKEEVRRILGLLDAYLKTRTFLVGERVTLADITVVCTLLWLYKQVLEPSFRQAFPNTNRWFLTCINQPQFRAVLGEVKLCEKMAQFDAKKFAETQPKKDTPRKEKGSREEKQKPQAERKEEKKAAAPAPEEEMDECEQALAAEPKAKDPFAHLPKSTFVLDEFKRKYSNEDTLSVALPYFWEHFDKDGWSLWYSEYRFPEELTQTFMSCNLITGMFQRLDKLRKNAFASVILFGTNNSSSISGVWVFRGQELAFPLSPDWQVDYESYTWRKLDPGSEETQTLVREYFSWEGAFQHVGKAFNQGKIFK

SEQ ID NO: 2500 - protein, 120 aa, Homo sapiens
  MISC_FEATURE (17): Xaa equals any of the twenty naturally occurring L-amino acids
  MISC_FEATURE (22): Xaa equals any of the twenty naturally occurring L-amino acids
PSSSRPKFAGGLLLLNXRTRRXDLGRGDMAKRTKKVGIVGKYGTRYGASLRKMVKKIEISQHAKYTCSFCGKTKMKRRAVGIWHCGSCMKTVAGGAWTYNTTSAVTVKSAIRRLKELKDQ

SEQ ID NO: 2501 - protein, 151 aa, Homo sapiens
STLGAMPSKGPLQSVQVFGRKKTATAVAHCKRGNGLIKVNGRPLEMIEPRTLQYKLLEPVLLLGKERFAGVDIRVRVKGGGHVAQIYAIRQSISKALVAYYQKYVDEASKKEIKDILIQYDRTLLVADPRRCESKKFGGPGARARYQKSYR

SEQ ID NO: 2502 - protein, 80 aa, Homo sapiens
KPYKCQECGNAFSGKSTLIQHQVTHTGQKPCHCSVYGKAFSQSSQLTPPQQTRVGEKPALNDGSKRYFIHIKKIFQERHF

SEQ ID NO: 2503 - protein, 265 aa, Homo sapiens
GFRFTRLPPGACPPLPVGTTAVAAGRGVGGSVGFCLTVGVRAVQLPAMAELDPFGAPAGAPGGPALGNGVAGAGEEDPAAAFLAQQESEIAGIENDEAFAILDGGAPGPQPHGEPPGGPDAVDGVMNGEYYQESNGPTDSYAAISQVDRLQSEPESIRKWREEQMERLEALDANSRKQEAEWKEKAIKELEEWYARQDEQLQKTKANNRAAEEAFVNDIDESSPGTEWERVARLCDFNPKSSKQAKDVSRMRSVLISLKQAPLVH

SEQ ID NO: 2504 - protein, 215 aa, Homo sapiens
GLAPPRSRTMAVKKIAIFGATGQTGLTTLAQAVQAGYEVTVLVRDSSRLPSEGPRPAHVVVGDVLQAADVDKTVAGQDAVIVLLGTRNDLSPTTVMSEGARNIVAAMKAHGVDKVVACTSAFLLWDPTKVPPRLQAVTDDHIRMHKVLRESGLKYVAVMPPHIGDQPLTGAYTVTLDGRGPSRVISKHDLGHFMLRCLTTDEYDGHSTYPSHQYQ

SEQ ID NO: 2505 - protein, 247 aa, Homo sapiens
QLTAPRSTPCLASFPIFALRCCLTGETWKRASLVLCRTCSPWPSATMEYLIGIQGPDYVLVASDRVAASNIVQMKDDHDKMFKMSEKILLLCVGEAGDTVQFAEYIQKNVQLYKMRNGYELSPTAAANFTRRNLADCLRSRTPYHVNLLLAGYDEHEGPALYYMDYLAALAKAPFAAHGYGAFLTLSILDRYYTPTISRERAVELLRKCLEELQKRFILNLPTFSVRIIDKNGIHDLDNISFPKQGS

SEQ ID NO: 2506 - protein, 102 aa, Homo sapiens
  MISC_FEATURE (4): Xaa equals any of the twenty naturally occurring L-amino acids
GAPXVPGPETSGRHICGPRAAAAAGKMKNEIAAVVFFFTRLVRKHDKLKKEAVERFAEKLTLILQEKYKNHWYPEKPSKGQAYRCIRVNKFQRVDPGCPESL

SEQ ID NO: 2507 - protein, 256 aa, Homo sapiens
EFPGRPTRPLEQDDMRILYKYLTTSLFPRHIEPELAGRDSPIRAEMPGNLQHYGRFLTGPLNLNDPDAKCRFPKIFVNTDDTYEELHLIVYKAMSAAVCFMIDASVHPTLDFCRRLDSIVGPQLTVLASDICEQFNINKRMSGSEKEPQFKFIYFNHMNLAEKSTVHMRKTPSVSLTSVHPDLMKILGDINSDFTRVDEDEEIIVKAMSDYWVVGKKSDRRELYVILNQKNANLIEVNEEVKKLCATQFNNIFFLD

SEQ ID NO: 2508 - protein, 206 aa, Homo sapiens
  MISC_FEATURE (14): Xaa equals any of the twenty naturally occurring L-amino acids
ILSAPAQLLGHPEXSVRAHTYRLLGHLLQHSMALRGALQSQSGLLSLLLLGLGDKDPVVRCSASFAVGNAAYQAGPLGPALAAAVPSMTQLLGDPQAGIRRNVASALGNLGPEGLGEELLQCEVPQRLLEMACGDPQPNVKEAALIALRSLQQEPGIHQVLVSLGASEKLSLLSLGNQSLPHSSPRPASAKHCRKLIHLLRPAHSM

SEQ ID NO: 2509 - protein, 171 aa, Homo sapiens
  MISC_FEATURE (4): Xaa equals any of the twenty naturally occurring L-amino acids
  MISC_FEATURE (7): Xaa equals any of the twenty naturally occurring L-amino acids
  MISC_FEATURE (11): Xaa equals any of the twenty naturally occurring L-amino acids
  MISC_FEATURE (15): Xaa equals any of the twenty naturally occurring L-amino acids
  MISC_FEATURE (18): Xaa equals any of the twenty naturally occurring L-amino acids
GAGXSKXKPTXAPYXSKXYSYVIHAKIKAVQRSGCNEVTTVVDVKEIFKSSSPIPRTQVPLITNSSCQCPHILPHQDVLIMCYEWRSRMMLLENCLVEKWRDQLSKRSIQWEERLQEQRRTVQGQERKTAGRTSRSNPPKPKGKTPAPKPASPKKNIKTRSAQKRTNPKRV

SEQ ID NO: 2510 - protein, 53 aa, Homo sapiens
FQRTKLIQSTFSDHSGMKLEIKCGRKTGKFANMWKVNHTLLNQQVKEETTREI

SEQ ID NO: 2511 - protein, 35 aa, Homo sapiens
SQQFGRPRQEDCLSPGVQDQPGQHSETPVSTECNN

SEQ ID NO: 2512 - protein, 191 aa, Homo sapiens
RSAREDRGFIMGGFFSSIFSSLFGTREMRILILGLDGAGKTTILYRLQVGEVVTTIPTIGFNVETVTYKNLKFQVWDLGGQTSIRPYWRCYYSNTDAVIYVVDSCDRDRIGISKSELVAMLEEEELRKAILVVFANKQDMEQAMTSSEMANSLGLPALKDRKWQIFKTSATKGTGLDEAMEWLVETLKSRQ

SEQ ID NO: 2513 - protein, 77 aa, Homo sapiens
EQKLELHRGGGRSRTSGSPGLQEFGTRKFQFRTPPTPRLWHGNTIGGTSKGLSFAADMGDLGFFLLPIFPVPFADLG

SEQ ID NO: 2514 - protein, 237 aa, Homo sapiens
  MISC_FEATURE (148): Xaa equals any of the twenty naturally occurring L-amino acids
  MISC_FEATURE (197): Xaa equals any of the twenty naturally occurring L-amino acids
  MISC_FEATURE (220): Xaa equals any of the twenty naturally occurring L-amino acids
  MISC_FEATURE (232): Xaa equals any of the twenty naturally occurring L-amino acids
  MISC_FEATURE (236): Xaa equals any of the twenty naturally occurring L-amino acids
VLNEFRAKLSKALALTARSLPAVQSDERLQPLLNHLSHSYTGQDYSTQGNVGKISLDQIDLLSTKSFPPCMRQLHKALRENHHLRHGGRMQYGLFLKGIGLTLEQALQFWKQEFIKGKMDPDKFDKGYSYNIRHSFGKEGKRTDYTPXSCLKIILSNPPSQGDYHGCPFRHSDPELLKQKLQSYKISPGGISQILDXVKGTHYQVACQKYFEMIHNVDDXGFSLNHPNQFFXESHXF

SEQ ID NO: 2515 - protein, 259 aa, Homo sapiens
  MISC_FEATURE (2): Xaa equals any of the twenty naturally occurring L-amino acids
  MISC_FEATURE (192): Xaa equals any of the twenty naturally occurring L-amino acids
  MISC_FEATURE (197): Xaa equals any of the twenty naturally occurring L-amino acids
  MISC_FEATURE (222): Xaa equals any of the twenty naturally occurring L-amino acids
  MISC_FEATURE (236): Xaa equals any of the twenty naturally occurring L-amino acids
  MISC_FEATURE (243): Xaa equals any of the twenty naturally occurring L-amino acids
VXRVKQLSQELMEKYEELKRMEAHNNEYKAEIKKLKEQILQGEQSYSSALEGMKMEISHLTQELHQRDITIASTKGSSSDMEKRLRAEMQKAEDKAVEHKEILDQLESLKLENRHLSEMVMKLELGLHEAKEISLADLQENYIEALNKLVSENQQLQKDLMNTKSQLEISTQMCKKQNDRIFKPTHSRTTEXKEYRXQANPWPAQDMMGIKTEHYKTDLHSXRGQASDSINPMSRXLSPHESXNQPLQLHQVFDFLLSM

SEQ ID NO: 2516 - protein, 126 aa, Homo sapiens
  MISC_FEATURE (30): Xaa equals any of the twenty naturally occurring L-amino acids
  MISC_FEATURE (122): Xaa equals any of the twenty naturally occurring L-amino acids
  MISC_FEATURE (124): Xaa equals any of the twenty naturally occurring L-amino acids
ARAEFGTSSARALVSGCGRLLRGLLAGPAXTSWSRLPARGFREVVETQEGKTTIIEGRITATPKESPNPPNPSGQCPICRWNLKHKYNYDDVLLLSQFIPAHGGMLPRKITGYARKNTRKIXEXRE

SEQ ID NO: 2517 - protein, 239 aa, Homo sapiens
  MISC_FEATURE (203): Xaa equals any of the twenty naturally occurring L-amino acids
  MISC_FEATURE (232): Xaa equals any of the twenty naturally occurring L-amino acids
AGRRSETLRQRRRRRKQPDPGGGGGGGSRSRLGCSVMKRVRTEQIQMAVSCYLKRRQYVDSDGPLKQGLRLSQTAEEMAANLTVQSESGCANIVSAAPCQAEPQQYEVQFGRLRNFLTDSDSQHSHEVMPLLYPLFVYLHLNLVQNSPKSTVESFYSRFHGMFLQNASQKDVIEQLQTTQTIQDILSNFKLRAFLDNKYVVRXQEDSYNYLIRYLQSDNNTALCKVLTLHIXLDSWHWF

SEQ ID NO: 2518 - protein, 24 aa, Homo sapiens
SQHFQRPGRADHPRSGVRDRLPAW

SEQ ID NO: 2519 - protein, 69 aa, Homo sapiens
  MISC_FEATURE (2): Xaa equals any of the twenty naturally occurring L-amino acids
  MISC_FEATURE (3): Xaa equals any of the twenty naturally occurring L-amino acids
IXXVFFFLRQGWPGWLFICFCIVFSEALSEDGQICVYFFKNDLKKYDVPLSWEQARLQTQKELQLREGR

SEQ ID NO: 2520 - protein, 78 aa, Homo sapiens
PLLQLRPEDVGFDGYSMPREGSTSKQMPPSDAEGDPLMNMLMRLQEAANYSSPQSYDSDSNSNSHHDDILDSSLESTL

SEQ ID NO: 2521 - protein, 334 aa, Homo sapiens
LPLSLFIPKNYIQIERQKILKGFNEMRVILDNEEQRELQKLEEGEVNVLDNLAAATDQLVQQRQDASTLISDLQRRLRGSSVEMLQDVIDVMKRSESWTLKKPKSVSKKLKSVFRVPDLSGMLQVLKELTDVQYYWVDVMLNPGSATSNVAISVDQRQVKTVRTCTFKNSNPCDFSAFGVFGCQYFSSGKYYWEVDVSGKIAWILGVHSKISSLNKRKSSGFAFDPSVNYSKVYSRYRPQYGYWVIGLQNTCEYNAFEDSSSSDPKVLTLFMAVPPCRIGVFLDYEAGIVSFFNVTNHGALIYKFSGCRFSRPAYPYFNPWNCLVPMTVCPPSS

SEQ ID NO: 2522 - protein, 430 aa, Homo sapiens
HEQRATEKPRLSRRPRRSERAVTVLLPSSASQRPPVSAPRPLARLCLTATMMFSGFNADYEASSSRCSSASPAGDSLSYYHSPADSFSSMGSPVNAQDFCTDLAVSSANFIPTVTAISTSPDLQWLVQPALVSSVAPSQTRAPHPFGVPAPSAGAYSRAGVVKTMTGGRAQSIGRRGKVEQLSPEEEEKRRIRRERNKMAAAKCRNRRRELTDTLQAETDQLEDEKSALQTEIANLLKEKEKLEFILAAHRPACKIPDDLGFPEEMSVASLDLTGGLPEVATPESEEAFTLPLLNDPEPKPSVEPVKSISSMELKTEPFDDFLFPASSRPSGSETARSVPDMDLSGSFYAADWEPLHSGSLGMGPMATELEPLCTPVVTCTPSCTAYTSSFVFTYPEADSFPSCAAAHRKGSSSNEPSSDSLSSPTLLAL

SEQ ID NO: 2523 - protein, 66 aa, Homo sapiens
SPLCPSPPELKIPENANVFYAMNSTANYDFVLKKRTFTKGVKVKHGASSTLPRMKQKGLKIAKGIF

SEQ ID NO: 2524 - protein, 345 aa, Homo sapiens
KRSPKHRSKSRERKRKRSSSRDNRKTVRARSRTPSRRSRSHTPSRRRRSRSVGRRRSFSISPSRRSRTPSRRSRTPSRRSRTPSRRSRTPSRRSRTPSRRRRSRSVVRRRSFSISPVRLRRSRTPLRRRFSRSPIRRKRSRSSERGRSPKRLTDLDKAQLLEIAKANAAAMCAKAGVPLPPNLKPAPPPTIEEKVAKKSGGATIEELTEKCKQIAQSKEDDDVIVNKPHVSDEEEEEPPFYHHPFKLSEPKPIFFNLNIAAAKPTPPKSQVTLTKEFPVSSGSQHRKKEADSVYGEWVPVEKNGEENKDDDNVFSSNLPSEVSRRNIMYFSFFIPESAISLLCYV

SEQ ID NO: 2525 - protein, 337 aa, Homo sapiens
  MISC_FEATURE (38): Xaa equals any of the twenty naturally occurring L-amino acids
  MISC_FEATURE (46): Xaa equals any of the twenty naturally occurring L-amino acids
  MISC_FEATURE (155): Xaa equals any of the twenty naturally occurring L-amino acids
CLGCKPDQPLRAEGRLLAPSGNPAPSPGSERLAGDDTXSAPAAPSXGCGKRRESDAGAGGERASVRTGSGRRGGANHGRGQRADPAEPPAAQRRRALPYRRHGGTASGKSSVCAKIVQLLGQNEVDYRQKQVVILSQDSFYRVLTSEQKAKALKXQFNFDHPDAFDNELILKTLKEITEGKTVQIPVYDFVSHSRKEETVTVYPADVVLFEGILAFYSQEVRDLFQMKLFVDTDADTRLSRRVLRDISERGRDLEQILSQYITFVKPAFEEFCLPTKKYADVIIPRGADNLVAINLIVQHIQDILNGGPSKRQTNGCLNGYTPSRKRQASESSSRPH

SEQ ID NO: 2526 - protein, 338 aa, Homo sapiens
AELKLNAMKKDQDKTDTLEHELRREVEDLKLRLQMAADHYKEKFKECQRLQKQINKLSDQSANNNNVFTKKTGNQQKVNDASVNTDPATSASTVDVKPSPSAAEADFDIVTKGQVCEMTKEIADKTEKYNKCKQLLQDEKAKCNKYADELAKMELKWKEQVKIAENVKLELAEVQDNYKELKRSLENPAERKMEDGADGAFYPDEIQRPPVRVPSWGLEDNVVCSQPARNFSRPDGLEDSEDSKEDENVPTAPDPPSQHLRGHGTGFCFDSSFDVHKKCPLCELMFPPNYDQSKFEEHVESHWKVCPMCSEQFPPDYDQQVFERHVQTHFDQNVLNFD

SEQ ID NO: 2527 - protein, 260 aa, Homo sapiens
  MISC_FEATURE (5): Xaa equals any of the twenty naturally occurring L-amino acids
  MISC_FEATURE (19): Xaa equals any of the twenty naturally occurring L-amino acids
  MISC_FEATURE (50): Xaa equals any of the twenty naturally occurring L-amino acids
  MISC_FEATURE (218): Xaa equals any of the twenty naturally occurring L-amino acids
TTSAXRWDGTRGRTRGRTXGFGNLSITQFWMMWAMVSWLKAKHGNNQPAXTGTLSRTNPPTQKPPSPPMSGRGTLGRNTPYKTLEPVKPPTVPNDYMTSPARLGSQHSPGRTASLNQRPRTHSGSSGGSGSRENSGSSSIGIPIAVPTPSPPTIGPAAPGSAPGSQYGTMTRQISRHNSTTSSTSSGGYRRTPSVTAQFSAQPHVNGGPLYSQNSIAXSPTPPPPPPPDGHSHVWMDSATSPTTTTSGIYERWRRLQLVS

SEQ ID NO: 2528 - protein, 46 aa, Homo sapiens
TLTTFSLLWPQILESSQTLLSVLKREAGNLTKATAPDQKSSGGRDS

SEQ ID NO: 2529 - protein, 134 aa, Homo sapiens
  MISC_FEATURE (38): Xaa equals any of the twenty naturally occurring L-amino acids
  MISC_FEATURE (66): Xaa equals any of the twenty naturally occurring L-amino acids
SETQPLSSPPTAASSKAPSSGSAQPPEGHPGKPEPSRXKSRPLPNMPKLVIPSAATKFPPEITVTXPTPTLLSPKGSISEETKQKLKSAILSAQSAANVRKESLCQPALEVLETSSQESSLESETDEDDDYMDI

SEQ ID NO: 2530 - protein, 561 aa, Homo sapiens
  MISC_FEATURE (156): Xaa equals any of the twenty naturally occurring L-amino acids
LSFTKLEDKMKAHSFLMDFIHQVGLFGRLGSFPVRGTPMATRLLLCEHAEKLSAAIVLKNHHSRLSDLVNTAILIALNKREYEIPSNLTPADVFFREVSQVDTICECLLEHEEQVLRDAPMDSIEWAEVVINVNNILKDMLQAASHYRQNRNSLYXREESLEKEPEYVPWTATSGPGGIRTVIIRQHEIVLKVAYPQADSNLRNIVTEQLVALIDCFLDGYVSQLKSVDKSSNRERYDNLEMEYLQKRSDLLSPLLSLGQYLWAASLAEKYCDFDILVQMCEQTDNQSRLQRYMTQFADQNFSDFLFRWYLEKGKRGKLLSQPISQHGQLANFLQAHEHLSWLHEINSQELEKAHATLLGLANMETRYFAKKKTLLGLSKLAALASDFSEDMLQEKIEEMAEQERFLLHQETLPEQLLAEKQLNLSAMPVLTAPQLIGLYICEENRRANEYDFKKALDLLEYIDEEEDININDLKLEILCKALQRDNWSSSDGKDDPIEVSKDSIFVKILQKLLKDGIQLSEYLPEVKDLLQADQLGSLKSNPYFEFVLKANYEYYVQGQI

SEQ ID NO: 2531 - protein, 33 aa, Homo sapiens
NNKRRRKTHHHHRFLCFFFPFFLPCLKTVGLGL

SEQ ID NO: 2532 - protein, 181 aa, Homo sapiens
  MISC_FEATURE (124): Xaa equals any of the twenty naturally occurring L-amino acids
  MISC_FEATURE (125): Xaa equals any of the twenty naturally occurring L-amino acids
  MISC_FEATURE (131): Xaa equals any of the twenty naturally occurring L-amino acids
  MISC_FEATURE (169): Xaa equals any of the twenty naturally occurring L-amino acids
  MISC_FEATURE (177): Xaa equals any of the twenty naturally occurring L-amino acids
PCEADAEDSDGSIASWELRVEGKLLDDPSKQKRKFSSFFKSLVIELDKDLYGPDNHLVEWHRTPTTQETDGFQVKRPGDLSVRCTLLLMLDYQPPQFKLDPRLARLLGLHTQSRSAIVQALWQXXKTNRLXDSHDKEYINGDKYFQQVTSLLNPGIWGAGGVLQQGKYXYQGNYHPXLLDS

SEQ ID NO: 2533 - protein, 44 aa, Homo sapiens
LGLQVGMHSKGTQTAKEEMEMDPKPDLDSDSWCLLGTDSCRPSL

SEQ ID NO: 2534 - protein, 223 aa, Homo sapiens
DFHDEEWVGKLAYLSDIFSLINELNLSLQGTLTTFFNLCNKIDVFKRKLKMWLKRTQENDYDMFPSFSEFSNSSGLNMTDITRIIFEHLEGLSQVFSDCFPPEQDLRSGNLWIIHPFMNHQNNNLTDFEEEKLTELSSDLGLQALFKSVSVTQFWINAKTSYPELHERAMKFLLPFSTVYLCDAAFSALTESKQKNLLGSGPALRLAVTSLIPRIEKLVKEKE

SEQ ID NO: 2535 - protein, 546 aa, Homo sapiens
  MISC_FEATURE (78): Xaa equals any of the twenty naturally occurring L-amino acids
  MISC_FEATURE (93): Xaa equals any of the twenty naturally occurring L-amino acids
  MISC_FEATURE (245): Xaa equals any of the twenty naturally occurring L-amino acids
  MISC_FEATURE (258): Xaa equals any of the twenty naturally occurring L-amino acids
  MISC_FEATURE (313): Xaa equals any of the twenty naturally occurring L-amino acids
  MISC_FEATURE (314): Xaa equals any of the twenty naturally occurring L-amino acids
VKMIHVRRHETRRNSKSHVPEQKSRVDWRRTKRSSISQLLDSDEELDSEEFDSDEELDSDESFENDEELDSNKGPDCXKTPGSERELNLSKIXSEGNDSKCLINSGNGSTYEEETNKIKHRNIDLQDQEKHLSQEDNDLNKQTGQIIEDDQEKHLSQEDNDLNKQTGQIIEDDLEEEDIKRGKRKRLSSVMCDSDESDDSDILVRKVGVKRPRRVVEDEGSSVEMEQKTPEKTLAAQKREKLQKXKELSKQRSRQRRXSGRDFEDSEKESCPSSDEVDEEEEEDNYESDEDGDDYIIDDFVVQDEEGDEENKXXQGEKLTTSQLKLVKQNSLYSFSDHYTHFERVVKALLINALDESFLGTLYDGTRQKSYAKDMLTSLHYLDNRFVQPRLESLVSRSRWKEQYKERVENYSNVSIHLKNPENCSCQACGLHRYCKYSVHLSGELYNTRTMQIDNFMSHDKQVFTVGRICASRTRIYHKLKHFKFKLYQECCTIAMTEEVEDEQVKETVERIFRRSKENGWIKEKYGQLEEYLNFADYFQEEKFEL

SEQ ID NO: 2536 - protein, 169 aa, Homo sapiens
LPPAAAAAVLSASPGALEREARSPRSPQTADTSPRPRAPACAPSRARAMPSDRPFKQRRSFADRCKEVQQIRDQHPSKIPVIIERYKGEKQLPVLDKTKFLVPDHVNMSELVKIIRRRLQLNPTQAFFLLVNQHSMVSVSTPIADIYEQEKDEDGFLYMVYASQETFGF

SEQ ID NO: 2537 - protein, 110 aa, Homo sapiens
QKGFQMLADPRSFDSNAFTLLLRAAFQSLLDAQADEAVLDHPDLKHIDPVVLKHCHAAAATYILEAGKHRADKSTLSTYLEDCKFDRERIELFCTEYQNNKNSLEILLGR

SEQ ID NO: 2538 - protein, 140 aa, Homo sapiens
VDLGCDGEPCFSCLYGNGPHPPAPQPSSRFNDAPAADKEPSVVQFCEFVSAPEVSRWAGPIIDVLLDYVGNVQLCSRLKEHIDSFEDWAVIKEKAEPPRPLAHLCRLRVRKAIGKYRIKLLDTLPLPGRLIRYLKYENTQ

SEQ ID NO: 2539 - protein, 217 aa, Homo sapiens
KVGMKLEGVDPEHQSVYCVLTVAEVCGYRIKLHFDGYSDCYDFWVNADALDIHPVGWCEKTGHKLHPPKGYKEEEFNWQTYLKTCKAQAAPKSLFENQNITVIPSGFRVGMKLEAVDKKNPSFICVATVTDMVDNRFLVHFDNWDESYDYWCEASSPHIHPVGWCKEHRRTLITPPGYPNVKHFSWDKYLEETNSLPAPARAFKVKPPAWIPEKNEA

SEQ ID NO: 2540 - protein, 103 aa, Homo sapiens
  MISC_FEATURE (84): Xaa equals any of the twenty naturally occurring L-amino acids
GMVIICCLGAPRTQPFQAQLPNLSAKLLAFPSTLSTPPVSELESALQMEPAAFQALYSAEKPKLEDEHLVFFCQMGKRGLQATXLARSLGYTGYGEVWLLAGR

SEQ ID NO: 2541 - protein, 149 aa, Homo sapiens
GQPTKALTAQKEDYDRLRPLSYPMTDVFLICFSVVNPASFQNVKEEWVPELKEYAPNVPFLLIGTQIDLRDDPKTLARLNDMKEKPICVEQGQKLAKEIGACCYVECSALTQKGLKTVFDEAIIAILTPKKHTVKKRIGSRCINCCLIT

SEQ ID NO: 2542 - protein, 64 aa, Homo sapiens
NPISTKNTKISRAWWWAPLVPATREAEVVVSQDHATALQPGQRAKLHPPKKKKRKKENKKKEKV

SEQ ID NO: 2543 - protein, 99 aa, Homo sapiens
KPHSFVRERHPRKSRGRYTLELGEGKRVNIYKDSKYAYLTLHAHATIWREREFLTSEGIPIKHQEDIRRLFLALQKPKEVAVLHCQGHQKEKKRSRREP

SEQ ID NO: 2544 - protein, 20 aa, Homo sapiens
ELGIGRELWLMPVIPALWET

SEQ ID NO: 2545 - protein, 94 aa, Homo sapiens
RYQKNMAAQIPESDQIKQFKEFLGTYNKLTETCFLDCVKDFTTREVKPEETTCSEHCLQKYLKMTQRISMRFQEYHIQQNEALAAKAGLLGQPR

SEQ ID NO: 2546 - protein, 338 aa, Homo sapiens
  MISC_FEATURE (284): Xaa equals any of the twenty naturally occurring L-amino acids
TTASSTIMSEPSQKARTTSSSVLHCEFCEFSSGYIQSIRRHYRDKHGGKKLFKCKDCSFYTGFKSAFTMHVEAGHSAVPEEGPKDLRCPLCLYHTKYKRNMIDHIVLHREERVVPIEVCRSKLSKYLQGVVFRCDKCTFTCSSDESLQQHIEKHNELKPYKCQLCYYETKHTEELDSHLRDEHKVSRNFELVGRVNLDQLEQMKEKMESSSSDDEDKEEEMNSKAEDRELMRFSDHGAALNTEKRFPCEFCGRAFSQGSEWERHVLRHGMALNDTKQVSREEIXPKEIMENSVKMPSIEEKEDDEAIGIDFSLKNETVAICVVTADKSLLENAEAKKE

SEQ ID NO: 2547 - protein, 144 aa, Homo sapiens
SPAAGPGSRSLSPGGRAAAMAKYLAQIIVMGVQVVGRAFARALRQEFAASRAAADARGRAGHRSAAASNLSGLSLQEAQQILNVSKLSPEEVQKNYEHLFKVNDKSVGGSFYLQSKVVRAKERLDEELKIQAQEDREKGQMPHT

SEQ ID NO: 2548 - protein, 418 aa, Homo sapiens
  MISC_FEATURE (372): Xaa equals any of the twenty naturally occurring L-amino acids
  MISC_FEATURE (384): Xaa equals any of the twenty naturally occurring L-amino acids
  MISC_FEATURE (386): Xaa equals any of the twenty naturally occurring L-amino acids
  MISC_FEATURE (389): Xaa equals any of the twenty naturally occurring L-amino acids
  MISC_FEATURE (396): Xaa equals any of the twenty naturally occurring L-amino acids
  MISC_FEATURE (400): Xaa equals any of the twenty naturally occurring L-amino acids
  MISC_FEATURE (414): Xaa equals any of the twenty naturally occurring L-amino acids
AVGKAALGRRPRRGSDSSMATAVRAVGCLPVLCSGTAGHLLGRQCSLNTLPAASILAWKSVLGNGHLSSLGTRDTHPYASLSRALQTQCCISSPSHLMSQQYRPYSFFTKLTADELWKGALAETGAGAKKGRGKRTKKKKRKDLNRGQIIGEGRYGFLWPGLNVPLMKNGAVQTIAQRSKEEQEKVEADMIQQREEWDRKKKMKVKRERGWSGNSWGGISLGPPDPGPCGETYEDFDTRILEVRNVFTMTAKEGRKKSIRVLVAVGNGKGAAGFSIGKATDRMDAFRKAKNRAVHHLHYIERYEDHTIFHDISLRFKRTHIKMKKQPKGYGLRCHRAIITICRLIGIKDMYAKVSGSINMLSLTQGLFRGLXRQETHQQLLIRXAXMLXKSGRNVXLCHXGCVPPGALEEGSNXKMKF

SEQ ID NO: 2549 - protein, 184 aa, Homo sapiens
HEQEHWPSQLLLRESLEDMMLHSALGLCLLLVTVSSNLAIAIKKEKRPPQTLSRGWGDDITWVQTYEEGLFYAQKSKKPLMVIHHLEDCQYSQALKKVFAQNEEIQEMAQNKFIMLNLMHETTDKNLSPDGQYVPRIMFVDPSLTVRADIAGRYSNRLYTYEPRDLPLLIENMKKALRLIQSEL

SEQ ID NO: 2550 - protein, 250 aa, Homo sapiens
  MISC_FEATURE (216): Xaa equals any of the twenty naturally occurring L-amino acids
  MISC_FEATURE (221): Xaa equals any of the twenty naturally occurring L-amino acids
AAPSRFMFLLFLLTCELAAEVAAEVEKSSDGPGAAQEPTWLTDVPAAMEFIAATEVAVIGFFQDLEIPAVPILHSMVQKFPGVSFGISTDSEVLTHYNITGNTICLFRLVDNEQLNLEDEDIESIDATKLSRFIEINSLHMVTEYNPVTVIGLFNSVIQIHLLLIMNKASPEYEENMHRYQKAAKLFQGKILFILVDSGMKENGKVISFFKLKESXLPALXIYQTLDDEWDTLPTAEVSVEHVQNFCDGF

SEQ ID NO: 2551 - protein, 407 aa, Homo sapiens
LFYYCSLSIFLTDAETLGESLLGLTVYGSNDQDPYVTLKDTEQYEREDFLIKPSDNLIVCGRAEQDQCNLEVHVYNQEEDSFYVHHDILLSAYPLSVEWLNFDPSPDDSTGNYIAVGNMTPVIEVWDLDIVDSLEPVFTLGSKLSKKKKKKGKKSSSAEGHTDAVLDLSWNKLIRNVLASASADNTVILWDMSLGKPAASLAVHTDKVQTLQFHPFEAQTLISGSYDKSVALYDCRSPDESHRMWRFSGQIERVTWNHFSPCHFLASTDDGFVYNLDARSDKPIFTLNAHNDEISGLDLSSQIKGCLVTASADKYVKIWDILGDRPSLVHSRDMKMGVLFCSSCCPDLPFIYAFGGQKEGLRVWDISTVSSVNEAFGRRERLVLGSARNSSISGPFGSRSSDTPMES

SEQ ID NO: 2552 - protein, 912 aa, Homo sapiens
  MISC_FEATURE (230): Xaa equals any of the twenty naturally occurring L-amino acids
  MISC_FEATURE (231): Xaa equals any of the twenty naturally occurring L-amino acids
  MISC_FEATURE (233): Xaa equals any of the twenty naturally occurring L-amino acids
  MISC_FEATURE (242): Xaa equals any of the twenty naturally occurring L-amino acids
  MISC_FEATURE (245): Xaa equals any of the twenty naturally occurring L-amino acids
  MISC_FEATURE (246): Xaa equals any of the twenty naturally occurring L-amino acids
  MISC_FEATURE (247): Xaa equals any of the twenty naturally occurring L-amino acids
  MISC_FEATURE (576): Xaa equals any of the twenty naturally occurring L-amino acids
  MISC_FEATURE (577): Xaa equals any of the twenty naturally occurring L-amino acids
KVNDVVPWVLDVILNKHIISPNPHVRQAACIWLLSLVRKLSTHKEVKSHLKEIQSAFVSVLSENDELSQDVASKGLGLVYELGNEQDQQELVSTLVETLMTGKRVKHEVSGETVVFQGGALGKTPDGQGLSTYKELCSLASDLSQPDLVYKFMNLANHHAMWNSRKGAAFGFNVIATRAGEQLAPFLPQLVPRLYRYQFDPNLGIRQAMTSIWNALVTDKSMVDKYLKEXXQXLVKNLTSNXWRXXXSSCLALNDLLRGRPLDDIIDKLPEIWETLFRVQDDIKESVRKAAELALKTLSKVCVKMCDPAKGAAGQRTIAALLPCLLDKGMMSTVTEVRALSINTLVKISKSAGAMLKPHAPKLIPALLESLSVLEPQVLNYLSLRATEQEKAAMDSARLSAAKSSPMMETINMCLQYLDVSVLGELVPRLCELIRSGVGLGTKGGCASVIVSLTTQCPQDLTPYSGKLMSALLSGLTDRNSVIQKSCAFAMGHLVRTSRDSSTEKLLQKLNGWYMEKEEPIYKTSCALTIHAIGRYSPDVLKNHAKEVLPLAFLGMHEIADEEKSEKEECNLWTEXXQENVPGSFGGIRLYLQELITITQKALQSQSWKMKAQGAIAMASIAKQTSSLVPPYLGMILTALLQGLAGRTWAGKEELLKAIACVVTACSAELEKSVPNQPSTNEILQAVLKECSKENVKYKIVAISCAADILKATKEDRFQEFSNIVIPLIKKNSLESSGVRTTKNEEENEKEKELQLEYLLGAFESLGKAWPRNAETQRCYRQELCKLMCERLKLSTWKVQLGVLQSMNAFFQGLMLLEEEHADPEALAEILLETCKSITYSLENKTYSSVRTEALSVIELLLKKLEESKQWECLTSECRVLLIESLATMEPDSRPELQEKAALLKKTLENLE

SEQ ID NO: 2553 - protein, 107 aa, Homo sapiens
  MISC_FEATURE (17): Xaa equals any of the twenty naturally occurring L-amino acids
  MISC_FEATURE (89): Xaa equals any of the twenty naturally occurring L-amino acids
  MISC_FEATURE (103): Xaa equals any of the twenty naturally occurring L-amino acids
GVLRCLLPSKDLTKAVXGVGGACRHAWVGGSWPWAPWSGPVCPLDGPSSSPDYYFVTREVMQRDIAAGDFIEHAEFSGNLYGTSKVAAXVGVGGLPGLLLATXDPGS

SEQ ID NO: 2554 - protein, 403 aa, Homo sapiens
  MISC_FEATURE (344): Xaa equals any of the twenty naturally occurring L-amino acids
  MISC_FEATURE (345): Xaa equals any of the twenty naturally occurring L-amino acids
  MISC_FEATURE (353): Xaa equals any of the twenty naturally occurring L-amino acids
  MISC_FEATURE (392): Xaa equals any of the twenty naturally occurring L-amino acids
RPPQPGPCRTAADRTQGPAPRTHAAAFAASPLTLCPVLHVAFLVSFSGGVAAAATRAGGASRCSFIRPHFLFRFHPSLPISFSLSPPASHPSPPPRNPLLPPSTGAMAAEEVLQTVDHYKTEIERLTKELTETTHEKGRDSGEEAHDYEVDINGLEILECKYRVAVTEVIDLKAEIKALKEKYNKSVENYTDEKAKYESKIQMYDEQVTSLEKTTKESGEKMAHMEKELQKMTSIANENHSTLNTAQDELVTFSEELAQLYHHVCLCNNETPNRVMLDYYRQSRVTRSGSLKGPDDPRGLLSPRLARRGVSSPVETRTSSEPVAKESTEASKEPSPTKTPTISXXITAPPSSXVLDTSDIRKEPMNIYNLNAIIRDQIKHLQKAVDRSLQLXRQRAAARELAP

SEQ ID NO: 2555 - protein, 48 aa, Homo sapiens
REQKLELHRGGGRSRTSGSPGLQEFGTRFFIPTDFFYLSQFHEVNYEV

SEQ ID NO: 2556 - protein, 101 aa, Homo sapiens
FFQKIMLSFHEEQEVLPETFLANFPSLIKMDIHKKVTDPSVAKSMMACLLSSLKANGSRGAFCEVRPDDKRILEFYSKLGCFEIAKMEGFPKDVVILGRSL

SEQ ID NO: 2557 - protein, 72 aa, Homo sapiens
IPLTKGNKSWSSTAVAAALELVDPPGCRNSARAYFEATPREGKHLPFYPHLLGLWDPPVLAPKAPWSHLTYP

SEQ ID NO: 2558 - protein, 138 aa, Homo sapiens
  MISC_FEATURE (133): Xaa equals any of the twenty naturally occurring L-amino acids
  MISC_FEATURE (136): Xaa equals any of the twenty naturally occurring L-amino acids
QSGAHEPDTQTATEEILPRDPSKVGSGPTHGPPPSQVHPYQTTGYSPYEILFSQPPPIIGQIKGDLRELRDLTLRKQMQGLGIAMQDVYGWVRERMPISLADPAHPFKPGDSVWVKKLNPTTLGPLWDGPHTXILXTH

SEQ ID NO: 2559 - protein, 321 aa, Homo sapiens
PSGARPSEATVVSSMAALLLGAVLLVAQPQLVPSRPAELGQQELLRKAGTLQDDVRDGVAPNGSAQQLPQTIIIGVRKGGTRALLEMLSLHPDVAAAENEVHFFDWEEHYSHGLGWYLSQMPFSWPHQLTVEKTPAYFTSPKVPERVYSMNPSIRLLLILRDPSERVLSDYTQVFYNHMQKHKPYPSIEEFLVRDGRLNVDYKALNRSLYHVHMQNWLRFFPLRHIHIVDGDRLIRDPFPEIQKVERFLKLSPQINASNFYFNKTKGFYCLRDSGRDRCLHESKGRAHPQVDPKLLNKLHEYFHEPNKKFFELVGRTFDWH

SEQ ID NO: 2560 - protein, 40 aa, Homo sapiens
GKEGGKGAGREGGREEENGEKRDNLENVDTQSKLLKHSIF

SEQ ID NO: 2561 - protein, 245 aa, Homo sapiens
  MISC_FEATURE (233): Xaa equals any of the twenty naturally occurring L-amino acids
SVSICLKMAANVGSMFQYWKRFDLQQLQRELDATATVLANRQDESEQSRKRLIEQSREFKKNTPEDLRKQVAPLLKSFQGEIDALSKRSKEAEAAFLNVYKRLIDVPDPVPALDLGQQLQLKVQRLHDIETENQKLRETLEEYNKEFAEVKNQEVTIKALKEKIREYEQTLKNQAETIALEKEQKLQNDFAEKERKLQETQMSTTSKLEEAEHKVQSLQTALEKTRTEYLTEXQYMKNSARPRDE

SEQ ID NO: 2562 - protein, 186 aa, Homo sapiens
  MISC_FEATURE (25): Xaa equals any of the twenty naturally occurring L-amino acids
  MISC_FEATURE (101): Xaa equals any of the twenty naturally occurring L-amino acids
  MISC_FEATURE (106): Xaa equals any of the twenty naturally occurring L-amino acids
  MISC_FEATURE (126): Xaa equals any of the twenty naturally occurring L-amino acids
DRYWRFNEETQRGDPGYPKPISVWXGIPASPKGAFLSNDAAYTYFYKGTKYWKFDNERLRMEPGYPKSILRDFMGCQEHVEPGPRWPDVARPPFNPHGGAXPGADXAEGDVGDGDGDFGAGVNKDXGSRVVVQMEEVARTVNVVMVLVPLLLLLCVLGLTYALVQMQRKGAPRVLLYCKRSLQEWV

SEQ ID NO: 2563 - protein, 65 aa, Homo sapiens
VAGTTGDCHHTQLIFCIFSRDRVSPCWPGWSRTPDLKRSTHLGLPKCWDYRREHHAQLGPGFSVF

SEQ ID NO: 2564 - protein, 277 aa, Homo sapiens
IRHSHTGQGSCWVATLASAMIPPADSLLKYDTPVLVSRNTEKRSPKARLLKVSPQQPGPSGSAPQPPKTKLPSTPCVPDPTKQAEEILNAILPPREWVEDTQLWIQQVSSTPSTRMDVVHLQEQLDLKLQQRQARETGICPVRRELYSQCFDELIREVTINCAERGLLLLRVRDEIRMTIAAYQTLYESSVAFGMRKALQAEQGKSDMERKIAELETEKRDLERQVNEQKAKCEATEKRESERRQVEEKKHNEEIQFLKRTNQQLKAQLEGIIAPKK

SEQ ID NO: 2565 - protein, 55 aa, Homo sapiens [sequence omitted]

SEQ ID NO: 2566 - protein, 109 aa, Homo sapiens
  MISC_FEATURE (71): Xaa equals any of the twenty naturally occurring L-amino acids
PAGIRRVTARTPGPPGSLEMGPLQFRDVAIEFSLEEWHCLDAAQRNLYRDVMLENYRNLIFLGIVVSKPNXITCLEQGKKPLTMKRHEMIAKPPVMYSHLPKTFGQSRA

SEQ ID NO: 2567 - protein, 67 aa, Homo sapiens
FFLLSVEMQSCYAVHAGLKLVGSSNPPASASQSARTTGLLVPNSCSPGDPLVLERPPPRWSSSFCSL

SEQ ID NO: 2568 - protein, 38 aa, Homo sapiens
  MISC_FEATURE (15): Xaa equals any of the twenty naturally occurring L-amino acids
PGAVAHTCNPSTLGXRGRCITRSGLRDQPGQHSETHLY

SEQ ID NO: 2569 - protein, 125 aa, Homo sapiens
  MISC_FEATURE (90): Xaa equals any of the twenty naturally occurring L-amino acids
  MISC_FEATURE (100): Xaa equals any of the twenty naturally occurring L-amino acids
KLTLTKGNKSWSSTAVAAALELVDPPGCRNSAQQEITNLMRVMTHFKPPMITVFKIQLRTGPFLGDTRKVIARTEERGVPKNVTLKFDTXATIDSKQHGXGCGSLNWKKKFTVKKNKYICQESYL

SEQ ID NO: 2570 - protein, 165 aa, Homo sapiens
  MISC_FEATURE (155): Xaa equals any of the twenty naturally occurring L-amino acids
VTPEAVKSVLLVVLPLPACLNPLLYLLFNPHFRDDLRRLRPRAGDSGPLAYAAAGELEKSSCDSTQALVAFSDVDLILEASEAGRPPGLETYGFPSVTLISCQQPGAPRLEGSHCVEPEGNHFGNPQPSMDGELLLRAEGSTPAGGGLSGGGGFXPSGLAFASHV

SEQ ID NO: 2571 - protein, 151 aa, Homo sapiens
  MISC_FEATURE (37): Xaa equals any of the twenty naturally occurring L-amino acids
  MISC_FEATURE (107): Xaa equals any of the twenty naturally occurring L-amino acids
  MISC_FEATURE (114): Xaa equals any of the twenty naturally occurring L-amino acids
  MISC_FEATURE (116): Xaa equals any of the twenty naturally occurring L-amino acids
  MISC_FEATURE (144): Xaa equals any of the twenty naturally occurring L-amino acids
  MISC_FEATURE (150): Xaa equals any of the twenty naturally occurring L-amino acids
TDAELFSADVNNYCCCLDAEAELETLQEPDKAVRRSXYHLWEGQKESLEKRAFASSELSNVDGGDYTTPSKPWDVAQDKENTFILGGVYGELKTFNSDGEWAVVPPXHTKGSLXQXAASDVVTIAGTDVFMTPGNSFAPGHRQXLETLRXI

SEQ ID NO: 2572 - protein, 46 aa, Homo sapiens
  MISC_FEATURE (15): Xaa equals any of the twenty naturally occurring L-amino acids
  MISC_FEATURE (37): Xaa equals any of the twenty naturally occurring L-amino acids
  MISC_FEATURE (38): Xaa equals any of the twenty naturally occurring L-amino acids
RCIFCRDGIFLYWPXWSGTPGFKQSSLLGLPKCYDYXXEPLCPAQF

SEQ ID NO: 2573 - protein, 28 aa, Homo sapiens
KDQQNKKLFLKKKHKIDKPLTKLPKDKR

SEQ ID NO: 2574 - protein, 92 aa, Homo sapiens
EDIALMDAHKGAEMFRRVHVPVLGLVQNMSVFQCPKCKHKTHIFGADGARKLAQTLGLEVLGDIPLHLNIREASDTGQPIVFSQPESDEVGE

SEQ ID NO: 2575 - protein, 114 aa, Homo sapiens
  MISC_FEATURE (40): Xaa equals any of the twenty naturally occurring L-amino acids
  MISC_FEATURE (81): Xaa equals any of the twenty naturally occurring L-amino acids
  MISC_FEATURE (83): Xaa equals any of the twenty naturally occurring L-amino acids
ICILQSIQVLLTELKRLYSWQPVIDYIDSKFEDYLNAESXVNRRQMPDNRVQCCLYFIAPSGHGLKPLDIEFMKRLHEKVXIXPLIAKADTLTPEECQQFKKQLKMVNIVILQF

SEQ ID NO: 2576 - protein, 377 aa, Homo sapiens
PVLRTHPGPQSLPRVPGVPCGGLLEPLSRAEVSPRLGLRRDLLGGMAPPGSSTVFLLALTIIASTWALTPTHYLTKHDVERLKASLDRPFTNLESAFYSIVGLSSLGAQVPDAKKACTYIRSNLDPSNVDSLFYAAQASQALSGCEISISNETKDLLLAAVSEDSSVTQIYHAVAALSGFGLPLASQEALSALTARLSKEETVLATVQALQTASHLSQQADLRSIVEEIEDLVARLDELGGVYLQFEEGLETTALFVAATYKLMDHVGTEPSIKEDQVIQLMNAIFSKKNFESLSEAFSVASAAAVLSHNRYHVPVVVVPEGSASDTHEQAILRLQVTNVLSQPLTQATVKLEHAKSVASRATVLQKTSFTCPSRLT

SEQ ID NO: 2577 - protein, 31 aa, Homo sapiens
NKSWSSTAVAAALELVDPPGCRNSARADSAY

SEQ ID NO: 2578 - protein, 178 aa, Homo sapiens
  MISC_FEATURE (30): Xaa equals any of the twenty naturally occurring L-amino acids
  MISC_FEATURE (132): Xaa equals any of the twenty naturally occurring L-amino acids
KWRKIFKRKTGQNRIKSACRRRKAANVTLXTSLVEGEAVHLARDFGYVCETEFPAKAVAEFLNRQHSDPNEQVTRKNMLLATKQICKEFTDLLAQDRSPLGNSRPNPILEPGIQSCLTHFNLISHGFGSPAXVCRVHGPAELSHRGPQGMDKMYLSNNPNSHTDNNAKSSDKEEKHRK

SEQ ID NO: 2579 - protein, 391 aa, Homo sapiens
LGTAEPVHGRESGGVEGLAWPLCPVEMLGQVVTLILLLLLKVYQGKGCQGSADHVVSISGVPLQLQPNSIQTKVDSIAWKKLLPSQNGFHHILKWENGSLPSNTSNDRFSFIVKNLSLLIKAAQQQDSGLYCLEVTSISGKVQTATFQVFVFDKVEKPRLQGQGKILDRGRCQVALSCLVSRDGNVSYAWYRGSKLIQTAGNLTYLDEEVDINGTHTYTCNVSNPVSWESHTLNLTQDCQNAHQEFRFWPFLVIIVILSALFLGTLACFCVWRRKRKEKQSETSPKEFLTIYEDVKDLKTRRNHEQEQTFPGGGSTIYSMIQSQSSAPTSQEPAYTLYSLIQPSRKSGSRKRNHSPSFNSTIYEVIGKSQPKAQNPARLSRKELENFDVYS

SEQ ID NO: 2580 - protein, 270 aa, Homo sapiens
PLLPRIVAERKMLPSISVNSPMQGNGVLNSRDAARHTAGAKRYKYLRRLFRFRQMDFEFAAWQMLYLFTSPQRVYRNFHYRKQTKDQWARDDPAFLVLLSIWLCVSTIGFGFVLDMGFFETIKLLLWVVFIDCVGVGLLISTLMWFISNKYLVKRQSRDYDVEWGYAFDVHLNAFYPLLVILHFIQLFFINHVILTDTFIGYFVGNTLWLVAVGYYIYVTFLGYSALPFLKNTVILLYPFAPLILLYGLSLALGWNFTHTLCSFYKYRVK

SEQ ID NO: 2581 - protein, 46 aa, Homo sapiens
PCSLSAPFPPTGTHRPLARLRRALSGPCQLWSLTLSVAELGLGYAS

SEQ ID NO: 2582 - protein, 168 aa, Homo sapiens
  MISC_FEATURE (79): Xaa equals any of the twenty naturally occurring L-amino acids
LCLKKKIPNMDKPRKENEEEPQSAPKTDEERPPVEHSPEKQSPEEQSSEEQSSEEEFFPEELLPELLPEMLLSEERPPXEGLSRKDLFEGRPPMEQPPCGVGKHKLEEGSFKERLARSRPQFRGDIHGRNLSNEEMIQAADELEEMKRVRNKLMIMHWKAKRSRPYPI

SEQ ID NO: 2583 - protein, 304 aa, Homo sapiens
  MISC_FEATURE (14): Xaa equals any of the twenty naturally occurring L-amino acids
  MISC_FEATURE (25): Xaa equals any of the twenty naturally occurring L-amino acids
  MISC_FEATURE (33): Xaa equals any of the twenty naturally occurring L-amino acids
  MISC_FEATURE (34): Xaa equals any of the twenty naturally occurring L-amino acids
  MISC_FEATURE (58): Xaa equals any of the twenty naturally occurring L-amino acids
  MISC_FEATURE (220): Xaa equals any of the twenty naturally occurring L-amino acids
EREASVKRNQTREXDGTEVLKGDEXKRYVNKLXXKSTVFKKKHQIIAELKAEFGLLQXTEELLKQRHENIQQQLQTMEEKKGISGYSYTQEELERVSALKSEVDEMKGRTLDDMSEMVKKLYSLVSEKKSALASVIKELRQLRQKYQELTQECDEKKSQYDSCAAGLESNRSKLEQEVRRLREECLQEESRYHYTNCMIKNLEVQLRRATDEMKAYISSXQQEKRKAIREQYTKNTAEQENLGKKLREKQKVIRESHGPNMKQAKMWRDLEQLMECKKQCFLKQQSQTSIGQVIQEGGEDRLIL

SEQ ID NO: 2584 - protein, 112 aa, Homo sapiens
GGLGPGPAITAVAGMPRVYIGRLSYQARERDVERFFKGYGKILEVDLKNGYGFVEFDDLRDADDAVYELNGKDLCGERVIVEHARAHGEMALRFWTHGYGYRRMGRDKYGPP

SEQ ID NO: 2585 - protein, 30 aa, Homo sapiens
GDKSWSSTAVAAALELVDPPGCRNSAREEI

SEQ ID NO: 2586 - protein, 43 aa, Homo sapiens
QVAACLPEKWFENSAMRTSIPQLENFIQFLLQSAHKLSRSEFR

SEQ ID NO: 2587 - protein, 136 aa, Homo sapiens
AGTRTHGVAHHVMHSLAVGTQLVFASSDSKVILAIRRAKNLRRLLYVSCNPRAAMGNFVDLCRAPSNRVKGIPFRPVKAVAVDLFPQTPHCEMLILFERVEHPNGTGVLGPHSPPAQPTPGPPDNTLQETGTFPSS

SEQ ID NO: 2588 - protein, 30 aa, Homo sapiens
EMFSRPFRKHGAVPLAICMQIYKKCHIVGQ

SEQ ID NO: 2589 - protein, 119 aa, Homo sapiens
  MISC_FEATURE (115): Xaa equals any of the twenty naturally occurring L-amino acids
GLGDQKTQTPHLLFSCSPGDIKQEGVGAFREGPPYQRRGALQLWQFLVALLDDPTNAHFIAWTGRGMEFKLIEPEEVGLSDVPSPPFQSLQPGGGRTWEMVARASIMILALPNLXSCQA

SEQ ID NO: 2590 - protein, 51 aa, Homo sapiens
  MISC_FEATURE (38): Xaa equals any of the twenty naturally occurring L-amino acids
LNFPQSLSLQGETQVTLRIHTGQARWLTPVIPALWEAXAGRSPEVGSSRPA

SEQ ID NO: 2591 - protein, 85 aa, Homo sapiens [sequence omitted]

SEQ ID NO: 2592 - protein, 134 aa, Homo sapiens
ARGTAAMTEADVNPKAYPLADAHLTKKLLDLVQQSCNYKQLRKGANEATKTLNRGISEFIVMAADAEPLEIILHLPLLCEDKNVPYVFVRSKQALGRACGVSRPVIACSVTIKEGSQLKQQIQSIQQSIERLLV

SEQ ID NO: 2593 - protein, 216 aa, Homo sapiens
  MISC_FEATURE (106): Xaa equals any of the twenty naturally occurring L-amino acids
  MISC_FEATURE (204): Xaa equals any of the twenty naturally occurring L-amino acids
  MISC_FEATURE (215): Xaa equals any of the twenty naturally occurring L-amino acids
AAAASGGAGSDNSVEHSDYRAKLSQIRQIYHTELEKYEQACNEFTTHVMNLLREQSRTRPISPKEIERMVSIIHRKFSSIQMQLKQSTCEAVMILRSRFLDARRKXRNFNKQATEILNEYFYSHLSNPYPSEEAKEELAKKCGITVSQVSNWFGNKRIRYKKNIGKFQEEANIYAAKTAVTATNVSAHGSQANSPSTPNSAGLXVLLTCQTLEIXS

SEQ ID NO: 2594 - protein, 142 aa, Homo sapiens
  MISC_FEATURE (75): Xaa equals any of the twenty naturally occurring L-amino acids
ANDMLATKDVVTLEDLHGRRLITLNANNPLQRRITSAMEARGVAGVSSVETTAAHSACGMVSGGLGITVCDPFTXSYSKYPGLTFRPLDQDIPFEVSMVFPGHQQRSKLASDFMQVVEGIFRSEFISMIPVKRTNRESLQFG

SEQ ID NO: 2595 - protein, 41 aa, Homo sapiens
  MISC_FEATURE (40): Xaa equals any of the twenty naturally occurring L-amino acids
SNAPADALELVDPPGCRNSISSLSIPSTSRGGPVPNSPYXE

SEQ ID NO: 2596 - protein, 67 aa, Homo sapiens
DTKHSGYGGQTKLIFREKARTTKKLVLRLECVEHRCRCKRMLDIKRCEHSELGGLRIFIATHMISII

SEQ ID NO: 2597 - protein, 201 aa, Homo sapiens
FGPHAGKLVAIVDVIDQNRALVDGPCTQVRRQAMPFKCMQLTDFILKFPHSAHQKYVRQAWQKADINTKWAATRWAKKIEARERKAKMTDFDRFKVMKAKKMRNRIIKNEVKKLQKAALLKASPKKAPGTKGTAAAAAAAAAAAAKVPAKKITAASKKAPAQKVPAQKATGQKAAPAPKAQKGQKAPAQKAPAPKASGKKA

SEQ ID NO: 2598 - protein, 385 aa, Homo sapiens
  MISC_FEATURE (2): Xaa equals any of the twenty naturally occurring L-amino acids
  MISC_FEATURE (5): Xaa equals any of the twenty naturally occurring L-amino acids
PXYIXYACRYRSGIPGSTHASADAWGSFVEVAKSWSLQRAVGAVAASSRVRTLRRGAEEREGARGSRSESRARTQPGPTALPSCPGRAPAMEHQLLCCEVETIRRAYPDANLLNDRVLRAMLKAEETCAPSVSYFKCVQKEVLPSMRKIVATWMLEVCEEQKCEEEVFPLAMNYLDRFLSLEPVKKSRLQLLGATCMFVASKMKETIPLTAEKLCIYTDNSIRPEELLQMELLLVNKLKWNLAAMTPHDFIEHFLSKMPEAEENKQIIRKHAQTFVALCATDVKFISNPPSMVAAGSVVAAVQGLNLRSPNNFLSYYRLTRFLSRVIKCDPDCLRACQEQIEALLESSLRQAQQNMDPKAAEEEEEEEEEVDLACTPTDVRDVDI

SEQ ID NO: 2599 - protein, 230 aa, Homo sapiens
FPGRNMAGSSEEAPDYGRGVVIMDDWPGYDLNLFTYPQHYYGDLEYVLIPHGIIVDRIERLAKDIMKDIGYSDIMVLCVLKGGYKFCADLVEHLKNISRNSDRFVSMKVDFIRLKSYRNDQSMGEMQIIGGDDLSTLAGKNVLIVEDVVGTGRTMKALLSNIEKYKPNMIKVASLLVKRTSRSDGFRPDYAGFEIPNLFVVGYALDYNEYFRDLNHICVINEHGKEKYRV

SEQ ID NO: 2600 - protein, 112 aa, Homo sapiens
TTMTFTCFVFFDMFNALSSRSQTKSVFEIGLCSNRMFCYAVLGSIMGQLLVIYFPPLQKVFQTESLSILDLLFLLGLTSSVCIVAEIIKKVERSREKIQKHVSSTSSSFLEV

SEQ ID NO: 2601 - protein, 155 aa, Homo sapiens
RWRGSMSGSMATAEASGSDGKGQEVETSVTYYRLEEVAKRNSLKELWLVIHGRVYDVTRFLNEHPGGEEVLLEQAGVDASESFEDVGHSSDAREMLKQYYIGDIHPSDLKPESGSKDPSKNDTCKSCWAYWILPIIGAVLLGFLYRYYTSESKSS

SEQ ID NO: 2602 - protein, 78 aa, Homo sapiens
GRPTRPADLWCVLSRLSCAKMLQSIIKNIWIPMKPYYTKVYQEIWIGMGLMGFIVYKIRAADKRSKALKASAPAPGHH

SEQ ID NO: 2603 - protein, 377 aa, Homo sapiens
  MISC_FEATURE (123): Xaa equals any of the twenty naturally occurring L-amino acids
  MISC_FEATURE (263): Xaa equals any of the twenty naturally occurring L-amino acids
  MISC_FEATURE (356): Xaa equals any of the twenty naturally occurring L-amino acids
WTCINFGVGSSVSSIQEASNAATQQFSGTDLLNGPLASSLNSDVPQQRPSVVVSPHSTTSVIQGHQIIAVPDSGSKVSHSPALSSDVRSTNGTAECKTVKRPAEDTDRETVAGIPNKVGVRIXTISDPNNAGCSATMVAVPAGADPSTVAKVAIESAVQQKQQHPPTYVQNVVPQNTPMPPSPAVQVQGQPNSSQPSPFSGSSQPGDPMRKPGQNFMCLWQSCKKWFQTPSQVFYHAATEHGGKDVYPGQCLWEGCEPFQRQXFSFITHLQDKHCSKDALLAGLKQDEPGQAGSQKSSTKQPTVGGTSSTPRAQKAIVNHPSAALMALRRGSRNLVFRDFTDEKEGPITKHIRLTXALILKNIGKYSECGRRNMNED

SEQ ID NO: 2604 - protein, 240 aa, Homo sapiens
RDRSCRGPGRRSPIPSPQVLGTTWVPRAGEMVCGGFACSKNALCALNVVYMLVSLLLIGVAAWGKGLGLVSSIHIIGGVIAVGVFLLLIAVAGLVGAVNHHQVLLFFYMIILGLVFIFQFVISCSCLAINRSKQTDVINASWWVMSNKTRDELERSFDCCGLFNLTTLYQQDYDFCTAICKSQSPTCQMCGEKFLKHSDEALKILGGVGLFFSFTEILGVWLAMRFRNQKDPRANPSAFL

SEQ ID NO: 2605 - protein, 182 aa, Homo sapiens
AGHSPLEADMALAKEESEKAAESRIKRLRDKYEAELSELEQSERKLQERCSELKGQLGEAEGENLRLQGLVRQKERALEDAQAVNEQLSSERSNLAQVIRQEFEDRLAASEEETRQAKAELATLQARQQLELEEVHRRVKTALARKEEAVSSLRTQHEAAVKRADHLEELLEQHRRPTPSTK

SEQ ID NO: 2606 - protein, 542 aa, Homo sapiens
DRFFFFSPLVFTKGQVTTGQYRMLAKRGGYVWVETQATVIYNTKNSQPQCIVCVNYVVSGIIQHDLIFSLQQTECVLKPVESSDMKMTQLFTKVESEDTSSLFDKLKKEPDALTLLAPAAGDTIISLDFGSNDTETDDQQLEEVPLYNDVMLPSPNEKLQNINLAMSPLPTAETPKPLRSSADPALNQEVALKLEPNPESLELSFTMPQIQDQTPSPSDGSTRQSSPEPNSPSEYCFYVDSDMVNEFKLELVEKLFAEDTEAKNPFSTQDTDLDLEMLAPYIPMDDDFQLRSFDQLSPLESSSASPESASPQSTVTVFQQTQIQEPTANATTTTATTDELKTVTKDRMEDIKILIASPSPTHIHKETTSATSSPYRDTQSRTASPNRAGKGVIEQTEKSHPRSPNVLSVALSQRTTVPEEELNPKILALQNAQRKRKMEHDGSLFQAVGIGTLLQQPDDHAATTSLSWKRVKGCKSSEQNGMEQKTIILIPSDLACRLLGQSMDESGLPQLTSYDCEVNAPIQGSRNLLQGEELLRALDQVN

SEQ ID NO: 2607 - protein, 97 aa, Homo sapiens
FVEVSQLYDCNWIVVNCSTPANYFHVLRRQILLPFRKPLIIFTPKSLLRHPEAKSSFDQMVSGTSFQRVIPEDGAAARALSRCSGSSSARERCTMTW

SEQ ID NO: 2608 - protein, 181 aa, Homo sapiens
HYRRYACRYRSGIPGSTHASAPAEFHSPRSTPWPGTSAPPCSCWPPWPCTLALAVDLGPRASRKNGKSPMVGGLLDADVNEEGVQQALNFALSEYNKASNDAYHSRAMRVVRVRKQVVAGLNYFLEVEIGRTRCTKSQPNLDSCPFHDQPHLMRKTLCSFQIYTVPWLGKTSLVKSSCQDA

SEQ ID NO: 2609 - protein, 226 aa, Homo sapiens
  MISC_FEATURE (208): Xaa equals any of the twenty naturally occurring L-amino acids
  MISC_FEATURE (209): Xaa equals any of the twenty naturally occurring L-amino acids
  MISC_FEATURE (212): Xaa equals any of the twenty naturally occurring L-amino acids
  MISC_FEATURE (214): Xaa equals any of the twenty naturally occurring L-amino acids
IEGTPAGTGPEFPGRPTRPKLSNSQKLPTLWLPDMKSPVISVKNASTEYSGTYSCTVTNRVGSDQCQLRLNVVPPSNRAGTIAGAIVGILLALVLIGLIVFCCRKKRREEKYEKEVHHDIREDVPPPKSRASTARSYIGSNHSSLGSMSPSNMEGYAKTQYNQVPSEDFERTPQSPTLPPAKVAAPNLSRMGAVPVMIPAQSKDGSIXXSLXTXICAFQVSFLLFG

SEQ ID NO: 2610 - protein, 139 aa, Homo sapiens
  MISC_FEATURE (107): Xaa equals any of the twenty naturally occurring L-amino acids
  MISC_FEATURE (115): Xaa equals any of the twenty naturally occurring L-amino acids
  MISC_FEATURE (129): Xaa equals any of the twenty naturally occurring L-amino acids
  MISC_FEATURE (130): Xaa equals any of the twenty naturally occurring L-amino acids
  MISC_FEATURE (134): Xaa equals any of the twenty naturally occurring L-amino acids
PGSRVPPLPPRPPGRTAWSRTPRNLTCPRRRQPLMAPEPSLRRGKLLQDCFFEDSSSTEEAGDKIVFNVNLSSVFVSTLDDDVSTLDDDSGVPPVLPSFPEEDSHTXEPKLFWTXTGKGPNNTFPLPLXXGPWXENVLF

SEQ ID NO: 2611 - protein, 191 aa, Homo sapiens
  MISC_FEATURE (141): Xaa equals any of the twenty naturally occurring L-amino acids
  MISC_FEATURE (142): Xaa equals any of the twenty naturally occurring L-amino acids
  MISC_FEATURE (184): Xaa equals any of the twenty naturally occurring L-amino acids
  MISC_FEATURE (187): Xaa equals any of the twenty naturally occurring L-amino acids
VDPRVRAQTNCDDAEDAGSSSDGLGLLLAGPAAHAHVPAHAPVNPPPQVISFFWENCHERKDPVLLKSMTLEPDPIAYPGNVTISAELQVRVPLSSPQKVELIIEKKVANFWIKVPCMSHVRCIFEDICQILDFLIPPGQXXPEPLHTYGLPCTVPSSRHLLNAQRLKLPCPNTDLPGLITSGXLPXLAFP

SEQ ID NO: 2612 - protein, 394 aa, Homo sapiens
  MISC_FEATURE (127): Xaa equals any of the twenty naturally occurring L-amino acids
  MISC_FEATURE (130): Xaa equals any of the twenty naturally occurring L-amino acids
  MISC_FEATURE (132): Xaa equals any of the twenty naturally occurring L-amino acids
  MISC_FEATURE (135): Xaa equals any of the twenty naturally occurring L-amino acids
PRVRLPLLAGASFHLTPVPVPARHVPPRRAERPAAAAAAAAAAAAVSAYGQGDCSFPPELPNAIQSVGDQQSFPEKFTVTYKCKEGFVKVPGKADSVVCLNNKWSEVAEFCNRSCDVPTRLQFASLXKSXTXQNXFPVGSVVEYECRPGYQRDHLLSGKLTCLLNFTWSKPDEFCKRKSCPNPGDLRHGHVNIPTDILYAAVIHFSCNKGYRLVGAASSYCSIVNDDVGWSDPLPECQEIFCPEPPKISNGVILDQQNTYVYQQAVKYECIKGFTLIGENSIYCTVKGDQGEWSGRRLNAKVLRFLQSYQQQRHHHSKCFSYKATSALRNPPLQMLQVPKLHQLLRNPPQGMFQVPKLHQLLRNPLQRMFQRPRQQSRIPSRQMRLYTGHASNP

SEQ ID NO: 2613 - protein, 396 aa, Homo sapiens
  MISC_FEATURE (204): Xaa equals any of the twenty naturally occurring L-amino acids
  MISC_FEATURE (210): Xaa equals any of the twenty naturally occurring L-amino acids
  MISC_FEATURE (244): Xaa equals any of the twenty naturally occurring L-amino acids
  MISC_FEATURE (245): Xaa equals any of the twenty naturally occurring L-amino acids
  MISC_FEATURE (248): Xaa equals any of the twenty naturally occurring L-amino acids
  MISC_FEATURE (273): Xaa equals any of the twenty naturally occurring L-amino acids
PAGAMRALPGLRGLRGPPPALRLPLLLLCLLAGERGSWADGNTTASPLTSLPIPEVMMTKYSNLSLKSHNISLTASPLTSLPIPEVMMTKYSNLSLESHNFSLTASPLTSLPIPEVMMTKYSNLFLESHNISLTEHSSVPVEKNITLERPSAVELTCQFTTSGDVNSVNVTWKKGDEQLKNYHVSATEGILYTQYKFSIINSEXLGSYSXFFEEEKERRGTFNFGVPEVQRKNKPLITYVGDSXXLVXKCRHCAPLNWTWYSGNRSVQVPLDXHMNEKYAINGTNANETRLKIMQLSEDDKGSYWCHAMFQLGESQESVELVVISYLVPLKPFLGIVVEVILLVAIILFCEMHTQKKKMHMDDGKEFEQVEQLKSDDSNGIENNAPRHRKNEAMSQ

SEQ ID NO: 2614 - protein, 213 aa, Homo sapiens
  MISC_FEATURE (212): Xaa equals any of the twenty naturally occurring L-amino acids
STHASEDVLAAPSGCRASRPPTSGREQFWARGLAAADMTKGLVLGIYSKDKEDDVPQFTSAGENFDKLVSGKLREILNISGPPLKAGKTRTFYGLHEDFPSVVVVGLGRKAAGVDDQENWHEGKENIRVAIAAGCRQVQDLEISSVEVDPCGDAQAAAEGAVLGLYEYDDLKQKKKVVVSAKLHGSGDQEACRRVSSLLLAELGTPLDGDSXQ

SEQ ID NO: 2615 - protein, 184 aa, Homo sapiens
  MISC_FEATURE (5): Xaa equals any of the twenty naturally occurring L-amino acids
RVRLXEDDRRGDRFWRQKGPRRPERDGPGAGGSEAARAASEMQHRGFLLLTLLALLALTSAVAKKKDKVKKGGPGSECAEWAWGPCTPSSKDCGVGFREGTCGAQTQRIRCRVPCNWKKEFGADCKYKFENWGACDGGTGTKVRQGTLKKARYNAQCQETIRVTKPCTPKTKAKAKAKKGKGKD

SEQ ID NO: 2616 - protein, 341 aa, Homo sapiens
  MISC_FEATURE (22): Xaa equals any of the twenty naturally occurring L-amino acids
  MISC_FEATURE (338): Xaa equals any of the twenty naturally occurring L-amino acids
RPTRPAGAPSGSFSNFPEVSRXGREEGNAIYRPGEPGARRVESVRGSSGSLVRRQPARPSPHRSFVVHTIRLPAMRFLLLTSTCCLLAMALAAEVKKPAAPGTAEKLSPKAATLAERSAGLAFSLYQAMAKDQAVENILLSPVVVASSLGLVSLGGKATTASQAKAVLSAEQLRDEEVHAGLGELLRAFSNSTARNVTWKLGSRLYGPSSVSFAEDFVRSSKQHYNCEHSKINFRDKRSALQSINEWAAQTTDGKLPEVTKDVERTDGALLVNAMFFKPHWDEKFHHKMVDNRGFMVTRSYTVGVTMMHRTGLYNYYDDEKEKRGKKKGPPFLGAPQXGKK

SEQ ID NO: 2617 - protein, 449 aa, Homo sapiens
NRVAARERESRPGASPARPRPTVVHANHFLAMRSLLLLSAFCLLEAALAAEVKKPAAAAAPGTAEKLSPKAATLAERSAGLAFSLYQAMAKDQAVENILVSPVVVASSLGLVSLGGKATTASQAKAVLSAEQLRDEEVHAGLGELLRSLSNSTARNVTWKLGSRLYGPSSVSFADDFVRSSKQHYNCEHSKINFRDKRSALQSINEWAAQTTDGKLPEVTKDVERTDGALLVNAMFFKPHWDEKFHHKMVDNRGFMVTRSYTVGVMMMHRTGLYNYYDDEKEKLQIVEMPLAHKLSSLIILMPHHVEPLERLEKLLTKEQLKIWMGKMQKKAVAISLPKGVVEVTHDLQKHLAGLGLTEAIDKNKADLSRMSGKKDLYLASVFHATAFELDTDGNPFDQDIYGREELRSPKLFYADHPFIFLVRDTQSGSLLFIGRLVRPKGDKMRDEL

SEQ ID NO: 2618 - protein, 70 aa, Homo sapiens
ADIAGVLAIRPDELRFRYSMVAYWRQAGLSYIRYSQICAKAVRDALKTEFKANAEKTSGSNVKIVKVKKE

SEQ ID NO: 2619 - protein, 314 aa, Homo sapiens
GKPGRGPRHEELLCSGRPWTWRAAARVTTMIPWVLLACALPCAADPLLGAFARRDFRKGSPQLVCSLPGPQGPPGPPGAPGPSGMMGRMGFPGKDGQDGHDGDRGDSGEEGPPGRTGNRGKPGPKGKAGAIGRAGPRGPKGVNGTPGKHGTPGKKGPKGKKGEPGLPGPCSCGSGHTKSAFSVAVTKSYPRERLPIKFDKILMNEGGHYNASSGKFVCGVPGIYYFTYDITLANKHLAIGLVHNGQYRIRTFDANTGNHDVASGSTILALKQGDEVWLQIFYSEQNGLFYDPYWTDSLFTGFLIYADQDDPNEV

SEQ ID NO: 2620 - protein, 82 aa, Homo sapiens
AGREVVTFVEGHQLRNLRLWQIEIMAGPESDAQYQFTGIKKYFNSYTLTGRMNCVLATYGSIALIVLYFKLRSKKTPAVKAT

SEQ ID NO: 2621 - protein, 272 aa, Homo sapiens
PCHLPQIWADPGKYALMGAAAQLGGIVRMTLSLTVIMMEATSNVTYGFPIMLVLMTAKIVGDVFIEGLYDMHIQLQSVPFLHWEAPVTSHSLTAREVMSTPVTCLRRREKVGVIVDVLSDTASNHNGFPVVEHADDTQPARLQGLILRSQLIVLLKHKVFVERSNLGLVQRRLRLKDFRDAYPRFPPIQSIHVSQDERECTMDLSEFMNPSPYTVPQEASLPRVFKLFRALGLRHLVVVDNRNQVVGLVTRKDLARYRLGKRGLEELSLAQT

SEQ ID NO: 2622 - protein, 60 aa, Homo sapiens
ACHSTSALFYVARACSPPCPPPQHPARDGENTQPKQICTFCLSNQRKLSKDRDRKTAIRS

SEQ ID NO: 2623 - protein, 207 aa, Homo sapiens
TVCGSFYLGIMQRASRLKRELHMLATEPPPGITCWQDKDQMDDLRAQILGGANTPYEKGVFKLEVIIPERYPFEPPQIRFLTPIYHPNIDSAGRICLDVLKLPPKGAWRPSLNIATVLTSIQLLMSEPNPDDPLMADISSEFKYNKPAFLKNARQWTEKHARQKQKADEEEMLDNLPEAGDSRVHNSTQKRKASQLVGIEKKFHPDV

SEQ ID NO: 2624 - protein, 223 aa, Homo sapiens
  MISC_FEATURE (16): Xaa equals any of the twenty naturally occurring L-amino acids
  MISC_FEATURE (109): Xaa equals any of the twenty naturally occurring L-amino acids
HLSLLPLILFIHDSQXAGTARHDREMAIQAKKKLTTATDPIERLRLQCLARGSAGIKGLGRVFRIMDDDNNRTLDFKEFMKGLNDYAVVMEKEEVEELFRRFDKDGNGXIDFNEFLLTLRPPMSRARKEVIMQAFRKLDKTGDGVITIEDLREVYNAKHHPKYQNGEWSEEQVFRKFLDNFDSPYDKDGLVTPEEFMNYYAGVSASIDTDVYFIIMMRTAWKL

SEQ ID NO: 2625 - protein, 141 aa, Homo sapiens
  MISC_FEATURE (1): Xaa equals any of the twenty naturally occurring L-amino acids
  MISC_FEATURE (18): Xaa equals any of the twenty naturally occurring L-amino acids
  MISC_FEATURE (134): Xaa equals any of the twenty naturally occurring L-amino acids
  MISC_FEATURE (136): Xaa equals any of the twenty naturally occurring L-amino acids
  MISC_FEATURE (137): Xaa equals any of the twenty naturally occurring L-amino acids
XLRKGPRLTERTLVYPLXLPKEPTSPPFRPCPEPDEKLWDPVGYYYSDGSLKIVPGHARCQPGGGPPSPPPGIPGQPLPSPTRLHLGGGRNSNANGYVRLQLGGEDRGGLGHPLPELADELRRKLQQRQPLPDXNXXESSV

SEQ ID NO: 2626 - protein, 295 aa, Homo sapiens
KQFLRTVEQESSWIPAHRSCAPPKCLTEAGFGADIGMEKFFNIKCRASGLVPNVVVLVATVRALKMHGGGPSVTAGVPLKKEYTEENIQLVADGCCNLQKQIQITQLFGVPVVVALNVFKTDTRAEIDLVCELAKRAGAFDAVPCYHWSVGGKGSVDLARAVREAASKRSRFQFLYDVQVPIVDKIRTIAQAVYGAKDIELSPEAQAKIDRYTQQGFGNLPICMAKTHLSLSHQPDKKGVPRDFILPISDVRASIGAGFIYPLVGTMSTMPGLPTRPCFYDIDLDTETEQVKGLF

SEQ ID NO: 2627 - protein, 347 aa, Homo sapiens
  MISC_FEATURE (5): Xaa equals any of the twenty naturally occurring L-amino acids
  MISC_FEATURE (16): Xaa equals any of the twenty naturally occurring L-amino acids
  MISC_FEATURE (30): Xaa equals any of the twenty naturally occurring L-amino acids
  MISC_FEATURE (169): Xaa equals any of the twenty naturally occurring L-amino acids
NHGSXPQIWGGSLAQXPVELMKTEQLNRFXGFGIGLASLFTENVLAHPCIVLRRQCQVNYHAQHYHLTPFTVINIMYSFNKTQGPRALWKGMGSTFIVQGVTLGAEGIISEFTPLPREVLHKWSPKQIGEHLLLKSLTYVVAMPFYSASLIETVQSEIIRDNTGILECXKEGIGRVIGMGVPHSKRLLPLLSLIFPTVLHGVLHYIISSVIQKFVLLILKRKTYNSHLAESTSPVQSMLDAYFPELIANFAASLCSDVILYPLETVLHRLHIQGTRTIIDNTDLGYEVLPINTQYEGMRDCINTIRQEEGVFGFYKGFGAVIIQYTLHAAVLQITKIIYSTLLQNNI

SEQ ID NO: 2628 - protein, 140 aa, Homo sapiens
  MISC_FEATURE (4): Xaa equals any of the twenty naturally occurring L-amino acids
  MISC_FEATURE (60): Xaa equals any of the twenty naturally occurring L-amino acids
  MISC_FEATURE (130): Xaa equals any of the twenty naturally occurring L-amino acids
SSAXGGRREQEFLHMAPGEVTITVRLIRSFEHRNFKPVVYHGVNLDQTVKEFIVFLKQDXPLRTNLPPPFRNYKYDALKIIHQAHKSKTNELVLSLEDDERLLLKEDSTLKAAGIASETEIAFFCEEDYXNYKANPISSW

SEQ ID NO: 2629 - protein, 222 aa, Homo sapiens
RGSYLGSFALQLGGAPSPRGPSQPDARVLCVSNTRSVPAAAPARRCPQLEEDIAAKEKLLRVSEDERDRVLEELHKAEDSLLAAEEAAAKAEADVASLNRRIQLVEEELDRAQERLATALQKLEEAEKAADESERGMKVIESRAQKDEEKMEIQEIQLKEAKHIAEDADRKYEEVARKLVIIESDLERAEERAELSEGQVPTAGRTIKNNGSDLESINGCRG

SEQ ID NO: 2630 - protein, 214 aa, Homo sapiens
EEAPWLVWGGEVELFPWGGAAASLHAPPAPGRAVLSPDYSLLLTFIYNGRVVGEAQVQSLDCRLVAEPSGSESSMEQVLFPKPGPLEPTQRLLSQLERGILVASNPRGLFVQRLCPIPISWNAPQAPPGPGPHLLPSNECVELFRTAYFCRDLVRYFQGLGPPPKFQVTLNFWEESHGSSHTPQNLITVKMEQAFARYLLEQTPEQQAAILSLV

SEQ ID NO: 2631 - protein, 184 aa, Homo sapiens
GDMGLKQFLDGPASMRIRELNLSNCVRLSDASVMKLSERCPNLNYLSLRNCEHLTAQGIGYIVNIFSLVSIDLSGTDISNEGLNVLSRHKKLKELSVSECYRITDDGIQITDSAMEMLSAKCHYLHILDISGCVLLTDQILEDLQIGCKQLRILKMQYCTNISKKAAQRMSSKVQQQEYNTNDP

SEQ ID NO: 2632 - protein, 56 aa, Homo sapiens
YRESWYACRYRSGIPGSTHASGILSHPGKSTLGSTAQQTWNAEVSESEVVKRKGMK

SEQ ID NO: 2633 - protein, 240 aa, Homo sapiens
  MISC_FEATURE (12): Xaa equals any of the twenty naturally occurring L-amino acids
  MISC_FEATURE (219): Xaa equals any of the twenty naturally occurring L-amino acids
EGECYPYFREQXLELHRGGGRSRTSGSPGLQEFPGPGGPSRVRVAMGQIEWAMWANEQALASGLILITGGIVATAGRFTQWYFGAYSIVAGVFVCLLEYPRGKRKKGSTMERWGQKHMTAVVKLFGPFTRNYYVRAVLHLLLSVPAGFLLATILGTACLAIASGIYLLAAVRGEQWTPIEPKPRERPQIGGTIKQPPSNPPPRPPAEARKKPSEEEAAXAAGGPPGGPQVNPIPVTDEVV

SEQ ID NO: 2634 - protein, 257 aa, Homo sapiens
HPLLQVPVRNSRVDPRVWLNPALIPTLQELLSKCRTCLQQRNSLQEQEAKERKTKDDEGATPIKRRRVSSDEEHTVDSCISDMKTETREVLTPTSTSDNETRDSSIIDPGTEQDLPSPENSSVKEYRMEVPSSFSEDMSNIRSQHAEEQSNNGRYDDCKEFKDLHCSKDSTLAEEESEFPSTSISAVLSDLADLRSCDGQALPSQDPEVALSLSCGHSRGLFSHMQQHDILDTLCRTIESTIHVVTRISGKGNQAAS

SEQ ID NO: 2635 - protein, 429 aa, Homo sapiens
  MISC_FEATURE (4): Xaa equals any of the twenty naturally occurring L-amino acids
FENXAIKNGKGLHSKKEVPIHRVADISGDTQKAKQFLPFLQRAGRSEAVVEYVFSGSRLKLYLPKETCLITFLLAGIECPRGARNLPGLVQEGEPFSEEATLFTKELVLQREVEVEVESMDKAGNFIGWLHIDGANLSVLLVEHALSKVHFTAERSSYYKSLLSAEEAAKQKKEKVWAHYEEQPVEEVMPVLEEKERSASYKPVFVTEITDDLHFYVQDVETGTQLEKLMENMRNDIASHPPVEGSYAPRRGEFCIAKFVDGEWYRARVEKVESPAKIHVFYIDYGNREVLPSTRLGTLSPAFSTRVLPAQATEYAFAFIQVPQDDDARTDAVDSVVRDIQNTQCLLNVEHLSAGCPHVTLQFADSKGDVGLGLVKEGLVMVEVRKEKQFQKVITEYLNAQESAKSARLNLWRYGDFRADDADEFGYSR

SEQ ID NO: 2636 - protein, 230 aa, Homo sapiens
RTRGWRTRRRAAVPACRCSAAVAAPVYPALGTAPSGETVPAMSAAMRERFDRFLHEKNCMTDLLAKLEAKTGVNRSFIALGVIGLVALYLVFGYGASLLCNLIGFGYPAYISIKAIESPNKEDDTQWLTYWVVYGVFSIAEFFSDIFLSWFPFYYMLKCGFLLWCMAPSPSNGAELLYKRIIRPFFLKHESQMDSVVKDLKDKAKETADAITKEAKKATVNLLGEEKKST

SEQ ID NO: 2637 - protein, 276 aa, Homo sapiens
  MISC_FEATURE (26): Xaa equals any of the twenty naturally occurring L-amino acids
AAQNGQSMPRHCSAAGCCTRDTRETXNRGISFHRLPKKDNPRRGLWLANCQRLDPSGQGLWDPASEYIYFCSKHFEEDCFELVGISGYHRLKEGAVPTIFESFSKLRRTTKTKGHSYPPGPPEVSRLRRCRKRCSEGRGPQLHFLHLHLLMSPAFLWKRPQHLPLCRPPQLGGWSLALAAPFQTYWAPWVPRQMKQAAAPSLHQSGSPPLSNHGQSPPQRICCACPHPPEPTSRMNTATRWAAPYSGSGEPRQPLMPLTRPSASCRPASGGSSGCG

SEQ ID NO: 2638 - protein, 174 aa, Homo sapiens
  MISC_FEATURE (71): Xaa equals any of the twenty naturally occurring L-amino acids
PAGALRNMAVAKHNLNIMIKRYNSTAATNEVPEVTVFSKSPVTLGQPNTLICLVDNIFPPVVNITWLSNGXSVTEGVSETSFLSKSDHSFFKISYLTFLPSADEIYDCKVEHWGLDEPLLKHWEPEIPTPMSELTETVVCALGLSVGLVGIVVGTVLIIRGLRSVGASRHQGPL

SEQ ID NO: 2639 - protein, 316 aa, Homo sapiens
  MISC_FEATURE (33): Xaa equals any of the twenty naturally occurring L-amino acids
  MISC_FEATURE (37): Xaa equals any of the twenty naturally occurring L-amino acids
KDLLLNTMSQKEKAAYLSDPRAPPCEYKDWLTXMSGXHDVGAYMLMYKGANRTETVTSFRKRESKVPADLLKRAFVRMSTSPEAFLALRSHFASSHALICISHWILGIGDRHLNNFMVAMETGGVIGIDFGHAFGSATQFLPVPELMPFRLTRQFINLMLPMKETGLMYSIMVHALRAFRSDPGLLTNTMDVFVKEPSFDWKNFEQKMLKKGGSWIQEINVAEKNWYPRQKICYAKRKLAGANPAVITCDELLLGHEKAPAFRDYVAVARGSKDHNIRAQEPESGLSEETQVKCLMDQATDPNILGRTWEGWEPWM

SEQ ID NO: 2640 - protein, 103 aa, Homo sapiens
VKVKDPTEYTGPESYVAQMIVEKNLDWFPRMRAMSLVSNEGDSEQNEIRSLQEKLESTMSLVKQLSGQLAELKEQMTEQRKNKQRLGFLGSNTPHVNHHMPPH

SEQ ID NO: 2641 - protein, 243 aa, Homo sapiens
  MISC_FEATURE (6): Xaa equals any of the twenty naturally occurring L-amino acids
  MISC_FEATURE (20): Xaa equals any of the twenty naturally occurring L-amino acids
CTFEGXNTVMMLQTARFLMXSYDQVHSGKLVCGMVSYLNDLPSQRIQPQQVAVWPTMVDINSPESLTEAYKLRAARLVEIAAKNLQKEVIHRKSKEVAWNLTSVDLVRASEAHCHYVVVKLFSEKLLKIQDKAIQAVLRSLCLLYSLYGISQNAGDFLQGSIMTEPQITQVNQRVKELLTLIRSDAVALVDAFDFQDVTLGSVLGRYDGNVYENLFEWAKNSPLNKAEVHESYKHLKSLQSKL

SEQ ID NO: 2642 - protein, 572 aa, Homo sapiens
  MISC_FEATURE (13): Xaa equals any of the twenty naturally occurring L-amino acids
  MISC_FEATURE (16): Xaa equals any of the twenty naturally occurring L-amino acids
  MISC_FEATURE (100): Xaa equals any of the twenty naturally occurring L-amino acids
  MISC_FEATURE (289): Xaa equals any of the twenty naturally occurring L-amino acids
YRESWYACRYRSXIPXRPRVRKKLVNEDKWRGKVSYQDYEIEISDASEVEKEINKAQNAIAGEGMGISHELITLEISSRDVPDLTLIDLPGITRVAVGNXPADIGYKIKTLIKKYIQRQETISLVVVPSNVDIATTEALSMAQEVDPEGDRTIGILTKPDLVDKGTEDKVVDVVRNLVFHLKKGYMIVKCRGQQEIQDQLSLSEALQREKIFFENHPYFRDLLEEGKATVPCLAEKLTSELITHICKSLPLLENQIKETHQRITEELQKYGVDIPEDENEKMFFLIDKXNAFNQDITALMQGEETVGEEDIRLFTRLRHEFHKWSTIIENNFQEGHKILSRKIQKFENQYRGRELPGFVNYRTFETIVKQQIKALEEPAVDMLHTVTDMVRLAFTDVSIKNFEEFFNLHRTAKSKIEDIRAEQEREGEKLIRLHFQMEQIVYCQDQVYRGALQKVREKELEEEKKKKSWDFGAFQSSSATDSSMEEIFQHLMAYHQEASKRISSHIPLIIQFFMLQTYGQQLQKAMLQLLQDKDTYSWLLKERSDTSDKRKFLKERLARLTQARRRLAQFPG

SEQ ID NO: 2643 - protein, 460 aa, Homo sapiens
PCPPRPQELPGRSPSSWSALGWPAALGGGVVAVAVCEPVARLLWAGTLKIAAMAENGDNEKMAALEAKICHQIEYYFGDFNLPRDKFLKEQIKLDEGWVPLEIMIKFNRLNRLTTDFNVIVEALSKSKAELMEISEDKTKIRRSPSKPLPEVTDEYKNDVKNRSVYIKGFPTDATLDDIKEWLEDKGQVLNIQMRRTLHKAFKGSIFVVFDSIESAKKFVETPGQKYKETDLLILFKDDYFAKKNEERKQNKVEAKLRAKQEQEAKQKLEEDAEMKSLEEKIGCLLKFSGDLDDQTCREDLHILFSNHGEIKWIDFVRGAKEGIILFKEKAKEALGKAKDANNGNLQLRNKEVTWEVLEGEVEKEALKKIIEDQQESLNKWKSKGRRFKGKGKGNKAAQPGSGKGKVQFQGKKTKFASDDEHDEHDENGATGPVKRAREETDKEEPASKQQKTENGAGDQ

SEQ ID NO: 2644 - protein, 169 aa, Homo sapiens
  MISC_FEATURE (60): Xaa equals any of the twenty naturally occurring L-amino acids
  MISC_FEATURE (108): Xaa equals any of the twenty naturally occurring L-amino acids
  MISC_FEATURE (128): Xaa equals any of the twenty naturally occurring L-amino acids
  MISC_FEATURE (163): Xaa equals any of the twenty naturally occurring L-amino acids
FIKDTLSWLDAVAHACNPPALWEAEARGSLEVRSSRPGWPTWRNPVSTKKTKVSQVRWCXPIIPATWESEAVRQKNRLNPGGRGCSEPRSCHCTLTRVRVTLSPKKKXTEKKNSRGGPVPNSPYSESXYNSLAVVLQRRDWENPAVPQLNRLAAKSPFRQLGXIAKKAP

SEQ ID NO: 2645 - protein, 522 aa, Homo sapiens
LVPLHWSCLVTRSLESADVAAQMASRLTLLTLLLLLLAGDRASSNPNATSSSSQDPESLQDRGEGKVATTVISKMLFVEPILEVSSLPTTNSTTNSATKITANTTDEPTTQPTTEPTTQPTIQPTQPTTQLPTDSPTQPTTGSFCPGPVTLCSDLESHSTEAVLGDALVDFSLKLYHAFSAMKKVETNMAFSPFSIASLLTQVLLGAGENTKTNLESILSYPKDFTCVHQALKGFTTKGVTSVSQIFHSPDLAIRDTFVNASRTLYSSSPRVLSNNSDANLELINTWVAKNTNNKISRLLDSLPSDTRLVLLNAIYLSAKWKTTFDPKKTRMEPFHFKNSVIKVPMMNSKKYPVAHFIDQTLKAKVGQLQLSHNLSLVILVPQNLKHRLEDMEQALSPSVFKAIMEKLEMSKFQPTLLTLPRIKVTTSQDMLSIMEKLEFFDFSYDLNLCGLTEDPDLQVSAMQHQTVLELTETGVEAAAASAISVARTLLVFEVQQPFLFVLWDQQHKFPVFMGRVYDPRA

SEQ ID NO: 2646 - protein, 359 aa, Homo sapiens
  MISC_FEATURE (190): Xaa equals any of the twenty naturally occurring L-amino acids
HASAHASECFGRFKMAVQESAAQLSMTLKVQEYPTLKVPYETLNKRFRAAQKNIDRETSHVTMVVAELEKTLSGCPAVDSVVSLLDGVVEKLSVLKRKAVESIQAEDESAKLCKRRIEHLKEHSSDQPAAASVWKRKRMDRMMVEHLLRCGYYNTAVKLARQSGIEDLVNIEMFLTAKEVEESLERRETXTCLAWCHDNKSRLRKMKSCLEFSLRIQEFIELIRQNKRLDAVRHARKHFSQAEGSQLDEVRQAMGMLAFPPDTHISPYKDLLDPARWRMLIQQFRYDNYRLHQLGNNSVFTLTLQAGLSAIKTPQCYKEDGSSKSPDCPVCSRSLNKLAQPCPWPTVPTPAWSARFLAT

SEQ ID NO: 2647 - protein, 200 aa, Homo sapiens
  MISC_FEATURE (33): Xaa equals any of the twenty naturally occurring L-amino acids
  MISC_FEATURE (195): Xaa equals any of the twenty naturally occurring L-amino acids
GKLVRLQVPVRNSRVDPRVREIPLSEILSLEPXKTSALIPNGANPHCFEITTANVVYYVGENVVNPSSPSPNNSVLTSGVGADVARMWEIAIQHALMPVIPKGSSVGTGTNLHRDISVSISVSNCQIQENVDISTVYQIFPDEVLGSGQFGIVYGGKHRKTGRDVAIKIIDKLRFPTKQESQLRNEVAILQNLHXPGVVN

SEQ ID NO: 2648 - protein, 248 aa, Homo sapiens
  MISC_FEATURE (5): Xaa equals any of the twenty naturally occurring L-amino acids
  MISC_FEATURE (212): Xaa equals any of the twenty naturally occurring L-amino acids
  MISC_FEATURE (223): Xaa equals any of the twenty naturally occurring L-amino acids
  MISC_FEATURE (225): Xaa equals any of the twenty naturally occurring L-amino acids
  MISC_FEATURE (226): Xaa equals any of the twenty naturally occurring L-amino acids
EEPPXFSSHKPRGDFPSPIHVSGPRLVQPHGPRFRLEGNAVLYGGWSFAFRLRSSSGLQVLNVHFGGERIAYEVSVQEAVALYGGHTPAGMQTKYLDVGWGLGSVTHELAPGIDCPETATFLDTFHYYDADDPVHYPRALCLFEMPTGVPLRRHFNSNFKGGFNFYAGLKGQVLVLRTTSTVYNYDYIWDFIFYPNGVMEAKMHATGYVHAXFYTPEGLAPRXFXXKTNLNGEHYTLYFGGNLTGGKT

SEQ ID NO: 2649 - protein, 175 aa, Homo sapiens
HELTDAASIAAARGEMSEVRPLSRDILMETLLYEQLLEPPTMEVLGMTDSEEDLDPMEDFDSLECMEGSDALALRLACIGDEMDVSLRAPRLAQLSEVAMHSLGLAFIYDQTEDIRDVLRSFMDGFTTLKENIMRFWRSPNPGSWVSCEQVLLALLLLLALLLPLLSGGLHLLLK

SEQ ID NO: 2650 - protein, 372 aa, Homo sapiens
  MISC_FEATURE (285): Xaa equals any of the twenty naturally occurring L-amino acids
RPTRPRPWSYNGGAMLRWGCRGRRWAFARVDGGSCHRRGAPTGSTSNQIRGESSVAQQPLHTAQKTRKGEHKWAAVVGLEIHAQISSNSKLFSGSQVRFSAPPNSLVSFFDASLPGTLPVLNRRCVEAAVMTGLALNCHINKKSLFDRKHYFYADLPAGYQITQQRLPIAVNGSLIYGVCAGKKQSQVIPKTVRIKQIQLEQDSGKSLHDNLRSQTLIDLNRAGVGLLEVVLEPDMSCGEEAATAVRELQLILQALGTSQANMAEGQLRVDANISVHHPGEPLGXRTEVKNLNSIRFLAKAIDYEIQRQINELENGGEILNETRSFHHKLGCTMSMRDKEGKQDYRFMPEPNLPPLVLYDATSLPAVHTHSK

SEQ ID NO: 2651 - protein, 547 aa, Homo sapiens
  MISC_FEATURE (130): Xaa equals any of the twenty naturally occurring L-amino acids
  MISC_FEATURE (162): Xaa equals any of the twenty naturally occurring L-amino acids
  MISC_FEATURE (169): Xaa equals any of the twenty naturally occurring L-amino acids
  MISC_FEATURE (191): Xaa equals any of the twenty naturally occurring L-amino acids
SPPEGAGCGEGAARWRRAGHLGRRGRGTLARNLLVDGETGESFPAQFPADISSITEAVPSESEPPALQNNLLSPLLTGTESPFDLEQQWQDLMSIMEMQAMEVNTSASEILYSAPPGDPLSTNYSLAPNXPINQNVSLHQASLGGCSQDFLLFSPEVESLPXASSSTLXPLAPSNSTSLNSTFGSTNLTGXFFPPQLNGTANDTAGPELPDPLGGLLDEAMLDEISLMDLAIEEGFNPVQASQLEEEFDSDSGLSLDSSHSPSSLSSSEGSSSSSSSSSSSSSSASSSASSSFSEEGAVGYSSDSETLDLEEAEGAVGYQPEYSKFCRMSYQDPAQLSCLPYLEHVGHNHTYNMAPSALDSADLPPPSALKKGSKEKQADFLDKQMSRDEHRARAMKIPFTNDKIINLPVEEFNELLSKYQLSEAQLSLIRDIRRRGKNKMAAQNCRKRKLDTILNLERDVEDLQRDKARLLREKVEFLRSLRQMKQKVQSLYQEVFGRLRDENGRPYSPSQYALQYAGDGSVLLIPRTMADQQARRQERKPKDRRK

SEQ ID NO: 2652 - protein, 164 aa, Homo sapiens
ALRNEMAVLWRLSAVCGALGGRALLLRTPVVRPAHISAFLQDRPIPEWCGVQHIHLSPSHHSGSKAASLHWTSERVVSVLLLGLLPAAYLNPCSAMDYSLAAALTLHGHWGLGQVVTDYVHGDALQKAAKAGLLALSALTFAGLCYFNYHDVGICKAVAMLWKL

SEQ ID NO: 2653 - protein, 678 aa, Homo sapiens
  MISC_FEATURE (57): Xaa equals any of the twenty naturally occurring L-amino acids
YFKILSSVMNKLETDLQASRELTSRLHEEINMKEQKIISLLSGKEEAIQVAIAELRXQHDKEIKELENLLSQEEEENIVLEEENKKAVDKTNQLMETLKTIKKENIQQKAQLDSFVKSMSSLQNDRDRIVGDYQQLEERHLSIILEKDQLIQEAAAENNKLKEEIRGLRSHMDDLNSENAKLDAELIQYREDLNQVITIKDSQQKQLLEVQLQQNKELENKYAKLEEKLKESEEANEDLRRSFNALQEEKQDLSKEIESLKVSISQLTRQVTALQEEGTLGLYHAQLKVKEEEVHRLSALFSSSQKRIAELEEELVCVQKEAAKKVGEIEDKLKKELKHLHHDAGIMRNETETAEERVAELARDLVEMEQKLLMVTKENKGLTAQIQSFGRSMSSLQNSRDHANEELDELKRKYDASLKELAQLKEQGLLNRERDALLSETAFSMNSTEENSLSHLEKLNQQLLSKDEQLLHLSSQLEDSYNQVQSFSKAMASLQNERDHLWNELEKFRKSEEGKQRSAAQPSTSPAEVQSLKKAMSSLQNDRDRLLKELKNLQQQYLQINQEITELHPLKAQLQEYQDKTKAFQIMQEELRQENLSWQHELHQLRMEKSSWEIHERRMKEQYLMAISDKDQQLSHLQNLIRAIEVFFLPDSASQSAIPKTGIPRDISFPRWVTKSGL

SEQ ID NO: 2654 - protein, 284 aa, Homo sapiens
DMCNTPTYCDLGKAAKDVFNKGYGFGMVKIDLKTKSCSGVEFSTSGHAYTDTGKASGNLETKYKVCNYGLTFTQKWNTDNTLGTEISWENKLAEGLKLTLDTIFVPNTGKKSGKLKASYKRDCFSVGSNVDIDFSGPTIYGWAVLAFEGWLAGYQMSFDTAKSKLSQNNFALGYKAADFQLHTHVNDGTEFGGSIYQKVNEKIETSINLAWTAGSNNTRFGIAAKYMLDCRTSLSAKVNNASLIGLGYTQTLRPGVKLTLSALIDGKNFSAGGHKVGLGFELEA

SEQ ID NO: 2655 - protein, 177 aa, Homo sapiens
HTDSAEQSKKTGNAVRAIGRLSSMAMISGLSGRKSSTGSPTSPLNAEKLESEEDVSQAFLEAVAEEKPHVKPYFSKTIRDLEVVEGSAARFDCKIEGYPDPEVVWFKDDQSIRESRHFQIDYDEDGNCSLIISDVCGDDDAKYTCKAVNSLGEATCTAELIVETMEEGEGEGEEEEE

SEQ ID NO: 2656 - protein, 643 aa, Homo sapiens
  MISC_FEATURE (77): Xaa equals any of the twenty naturally occurring L-amino acids
  MISC_FEATURE (318): Xaa equals any of the twenty naturally occurring L-amino acids
  MISC_FEATURE (598): Xaa equals any of the twenty naturally occurring L-amino acids
IQQLVADGVWGSRWGPQLLRQPQLHPTPVPLRPAFLQEEVRRAGLVLPPPKGRLPAPPPRDLLRIQEETERLAQELXDVRGNQQALRAQLHQLQLHAAVLRQGHEPQLAAAHTDGASERTPLLQAPGGPHQDLRVNFVAGAVEPHKAPALERLLWRACRGFLIASFRELEQPLEHPVTGEPATWMTFLISYWGEQIGQKIRKITDCFHCHVFPFLQQEEARLGALQQLQQQSQELQEVLGETERFLSQVLGRVLQLLPPGQVQVHKMKAVYLALNQCSVSTTHKCLIAEAWCSVRDLPALQEALRDSSMEEGVSAVAXRIPCRDMPPTLIRTNRFTASFQGIVDAYGVGRYQEVNPAPYTIITFPFLFAVMFGDVGHGLLMFLFALAMVLAENRPAVKAAQNEIWQTFFRGRYLLLLMGLFSIYTGFIYNECFSRATSIFPSGWSVAAMANQSGWSDAFLAQHTMLTLDPNVTGVFLGPYPFGIDPIWSLAANHLSFLNSFKMKMSVILGVVHMAFGVVLGVFNHVHFGQRHRLLLETLPELTFLLGLFGYLVFLVIYKWLCVWAARAASAPSILIHFINMFLFSHSPSNRLLYPRQXGCGWWGPGSHGLMGTPRSQGHWELQDPRPRNGDAGPGPCRQGRQR

SEQ ID NO: 2657 - protein, 394 aa, Homo sapiens
  MISC_FEATURE (16): Xaa equals any of the twenty naturally occurring L-amino acids
  MISC_FEATURE (383): Xaa equals any of the twenty naturally occurring L-amino acids
VLADVSYLMAMEKSKXTPAARASKKILLPEPSIRSVMQKYLEDRGEVTFEKIFSQKLGYLLFRDFCLNHLEEARPLVEFYEEIKKYEKLETEEERVARSREIFDSYIMKELLACSHPFSKSATEHVQGHLGKKQVPPDLFQPYIEEICQNLRGDVFQKFIESDKFTRFCQWKNVELNIHLTMNDFSVHRIIGRGGFGEVYGCRKADTGKMYAMKCLDKKRIKMKQGETLALNERIMLSLVSTGDCPFIVCMSYAFHTPDKLSFILDLMNGGDLHYHLSQHGVFSEADMRFYAAEIILGLEHMHNRFVVYRDLKPANILLDEHGHVRISDLGLACDFSKKKPHASVGTHGYMAPEVLQKGVAYDSSADWFSLGCMLFKLLRGHXPFPAAQDQRQA

SEQ ID NO: 2658 - protein, 176 aa, Homo sapiens
  MISC_FEATURE (164): Xaa equals any of the twenty naturally occurring L-amino acids
ATMDRPGFVAALVAGGVAGVSVDLILFPLDTIKTRLQSPQGFSKAGGFHGIYAGVPSAAIGSFPNAAAFFITYEYVKWFLHADSSSYLTPMKHMLAASAGEVVACLIRVPSEVVKQRAQVSASTRTFQIFSNILYEEGIQGLYRGYKSTVLREVVKLWPVSSRXILGGKKPFLSLI

SEQ ID NO: 2659 - protein, 151 aa, Homo sapiens [sequence omitted]

SEQ ID NO: 2660 - protein, 439 aa, Homo sapiens
  MISC_FEATURE (57): Xaa equals any of the twenty naturally occurring L-amino acids
  MISC_FEATURE (148): Xaa equals any of the twenty naturally occurring L-amino acids
  MISC_FEATURE (415): Xaa equals any of the twenty naturally occurring L-amino acids
  MISC_FEATURE (419): Xaa equals any of the twenty naturally occurring L-amino acids
QTTYQTSEDQTADKTSSDSKDPADQIQITILSSEQMKEIFPEQDDQPYVVDKLAEPXKEEPITEVVSQCDLQAPAAGQSRDSVILDSEKDDIHCCALGWLSMVYEGVPQCQCNSIKNSSSEEEKQKEQCSPLDTNSCKQGERTSDRDXTVVQFKSLVNNPKTPPDGKSHFPELQDDSRKDTPKTKHKSLPRTEQELVAGQFSSKCDKLNPLQNHKRKKLRFHEVTFHSSNKMTASYEQASQETRQKKHVTQNSRPLKTKTAFLPNKDVYKKHSSLGQSLSPEKIKLKLKSVSFKQKRKLDQGNVLDMEVKKKKHDKQEQKGSVGATFKLGDSLSNPNERAIVKEKMVSNTKSVDTKASSSKFSRILTPKEYLQRQKHKEALSNKASKKICVKNVPCDSEHMRPSKLAVQVESCGXSNEXHSSGVQTSKESIKWLDQAMG

SEQ ID NO: 2661 - protein, 59 aa, Homo sapiens
VKFLFPLDNVNSRLSKRSFSADGFEMLQNPVKDSKEMFQTYKQMYLEKRSRSLGSSPVK

SEQ ID NO: 2662 - protein, 506 aa, Homo sapiens
  MISC_FEATURE (496): Xaa equals any of the twenty naturally occurring L-amino acids
PWTQVKTDLKMMFQNLPCLLQTKSAMMTARRSVEDEEKKESSLPKSFKRKISVVSATKGVPAGNSDTEGGQPGRKRRWGASTATTQKKPSISITTESLKSLIPDIKPLAGQEAVVDLHADDSRISEDETERNGDDGTHDKGLKICRTVTQVVPAEGQENGQREEEEEEKEPEAEPPVPPQVSVEVALPPPAEHEVKKVTLGDTLTRRSISQQKSGVSITIDDPVRTAQVPSPPRGKISNIVHISNLVRPFTLGQLKELLGRTGTLVEEAFWIDKIKSHCFVTYSTVEEAVATRTALHGVKWPQSNPKFLCADYAEQDELDYHRGLLVDRPSETKTEEQGIPRPLHPPPPPPVQPPQHPRAEQREQERAVREQWAEREREMERRERTRSEREWDRDKVREGPRSRSRSRDRRRKERAKSKEKKSEKKEKAQEEPPAKLLDDLFRKTKAAPCIYWLPLTDSQIVQKEAERAERAKEREKRRKEQEEEEQKEREKEAEXEQPGPGLGHL

SEQ ID NO: 2663 - protein, 109 aa, Homo sapiens
GGQKHPTGLLKPPANTAATMPKRKAKGDAKGDKAKVKDEPQRRSARLSAKPAPPKPEPRPKKASAKKGEKLPKGRKGKADAGKDGNNPAKNRDASTLQSQKAEGTGDAK

SEQ ID NO: 2664 - protein, 225 aa, Homo sapiens
  MISC_FEATURE (24): Xaa equals any of the twenty naturally occurring L-amino acids
  MISC_FEATURE (220): Xaa equals any of the twenty naturally occurring L-amino acids
  MISC_FEATURE (221): Xaa equals any of the twenty naturally occurring L-amino acids
ELVWSRQPPPSSPCLDNRAEYVRXAINYRLHEFDEQVAAVREGMARVVPVPLLSLFTGYELETMVCGSPDIPLHLLKSVATYKGIEPSASLIQWFWEVMESFSNTERSLFLRFVWGRTRLPRTIADFRGRDFVIQVLDKYNPPDHFLPESYTCFFLLKLPRYSCKQVLEEKLKYAIHFCKSIDTDDYARIALTGEPAADDSSDDSDNEDVDSFASDSTQXXLTGH

SEQ ID NO: 2665 - protein, 1058 aa, Homo sapiens
  MISC_FEATURE (22): Xaa equals any of the twenty naturally occurring L-amino acids
  MISC_FEATURE (1033): Xaa equals any of the twenty naturally occurring L-amino acids
KGPKVPKESLEGSPRPPKKGKXKPPKATKKPKEKPPKATKKPKEKPPKATKKPKEKPPKATKKPPSGKRPPILAPSETLEWPLPPPPSPGPEELPQEGGAPLSNNWQNPGEETHVEAREHQPEPEEETEQPTLDYNDQIEREDYEDFEYIRRQKQPRPPPSRRRRPERVWPEPPEEKAPAPAPEERIEPPVKPLLPPLPPDYGDGYVIPNYDDMDYYFGPPPPQKPDAERQTDEEKEELKKPKKEDSSPKEETDKWAVEKGKDHKEPRKGEELEEEWTPTEKVKCPPIGMESHRIEDNQIRASSMLRHGLGAQRGRLNMQTGATEDDYYDGAWCAEDDARTQWIEVDTRRTTRFTGVITQGRDSSIHDDFVTTFFVGFSNDSQTWVMYTNGYEEMTFHGNVDKDTPVLSELPEPVVARFIRIYPLTWNGSLCMRLEVLGCSVAPVYSYYAQNEVVATDDLDFRHHSYKDMRQLMKVVNEECPTITRTYSLGKSSRGLKIYAMEISDNPGEHELGEPEFRYTAGIHGNEVLGRELLLLLMQYLCREYRDGNPRVRSLVQDTRIHLVPSLNPDGYEVAAQMGSEFGNWALGLWTEEGFDIFEDFPDLNSVLWGAEERKWVPYRVPNNNLPIPERYLSPDATVSTEVRAIIAWMEKNPFVLGANLNGGERLVSYPYDMARTPTQEQLLAAAMAAARGEDEDEVSEAQETPDHAIFRWLAISFASAHLTLTEPYRGGCQAQDYTGGMGIVNGAKWNPRTGTINDFSYLHTNCLELSFYLGCDKFPHESELPREWENNKEALLTFMEQVHRGIKGVVTDEQGIPIANATISVSGINHGVKTASGGDYWRILNPGEYRVTAHAEGYTPSAKTCNVDYDIGATQCNFILARSNWKRIREIMAMNGNRPIPHIDPSRPMTPQQRRLQQRRLQHRLRLRAQMRLRRLNATTTLGPHTVPPTLPPAPATTLSTTIEPWGLIPPTTAGWEESETETYTEVVTEFGTEVEPEFGTKVEPEFETQLEPEFETQLEPEFEEEEEEEXEEEIATGQAFPFTTVETYTVNFGDF

SEQ ID NO: 2666 - protein, 154 aa, Homo sapiens
KKITYKMNPAVRQRCLLFCFQQKLILSHFFLLQVPQWCAEYCLSIHYQHGGVICTQVHKQTVVQLALRVADEMDVNIGHEVGYVIPFENCCTNETILRYCTDDMLQREMMSNPFLGSYGVIILDDIHERSIATDVLLGLLKDVLLARPELEAHN

SEQ ID NO: 2667 - protein, 164 aa, Homo sapiens
GEHAGCALRRPRVIPARRRHPPRRGPDHPHSTALPLRHLLTAQPRLMEPIYLVEIQCPEQVVGGIYGVLNRKRGHVFEESQVAGTPMFVVKAYLPVNESFGFTADLRSNTGGQAFPQCVFDHWQILPGDPFDNSSRPSQVVAETRKRKGLKEGIPALDNFLDKL

SEQ ID NO: 2668 - protein, 147 aa, Homo sapiens
HELSSGREREMLQAPRGRARAALRRLAVATRTMAGAPTVSLPELRSLLASGRARLFDVRSREEAAAGTIPGALNIPVSELESALQMEPAAFQALYSAEKPKLEDEHLVFFCQMGKRGLQATQLARSLGYTGARNYAGAYREWLEKES

SEQ ID NO: 2669 - protein, 237 aa, Homo sapiens
RPDPPAAAPARPAPRPAMGAAARTLRLALGLLLLATLLRPADACSCSPVHPQQAFCNADVVIRAKAVSEKEVDSGNDIYGNPIKRIQYEIKQIKMFKGPEKDIEFIYTAPSSAVCGVSLDVGGKKEYLIAGKAEGDGKMHITLCDFIVPWDTLSTTQKKSLNHRYQMGCECKITRCPMIPCYISSPDECLWMDWVTEKNINGHQAKFFACIKRSDGSCAWYRGAAPPKQEFLDIEDP

SEQ ID NO: 2670 - protein, 30 aa, Homo sapiens
TPISTKNTKISQARWRAHVVPATREADAEE

SEQ ID NO: 2671 - protein, 190 aa, Homo sapiens
  MISC_FEATURE (2): Xaa equals any of the twenty naturally occurring L-amino acids
  MISC_FEATURE (3): Xaa equals any of the twenty naturally occurring L-amino acids
KXXAYTSSLIKHRRIHTGERPYECSECGRSFAENSSLIKHLRVHTGERPYECVECGKSFRRSSSLLQHQRVHTRERPYECSECGKSFSLRSNLIHHQRVHTGERHECGQCGKSFSRKSSLIIHLRVHTGERPYECSDCGKSFAENSSLIKHLRVHTGERPYECIDCGKSFRHSSSFRRHQRVHTGMRPYK

SEQ ID NO: 2672 - protein, 89 aa, Homo sapiens
KKKKKKNSRVLLERPRAHRFSTRVGYQVSVPNSPYSESYYNSLAVVLQRRDWENPGVTQLNRLAAHPPFASWRNSEEARTDRPSQQLRS

SEQ ID NO: 2673 - protein, 680 aa, Homo sapiens
  MISC_FEATURE (186): Xaa equals any of the twenty naturally occurring L-amino acids
  MISC_FEATURE (450): Xaa equals any of the twenty naturally occurring L-amino acids
GSLMSVKMGKKYKNIVLLKGLEVINDYHFRMVKSLLSNDLKLNLKMREEYDKIQIADLMEEKFRGDAGLGKLIKIFEDIPTLEDLAETLKKEKLKVKGPALSRKRKKEVDATSPAPSTSSTVKTEGAEATPGAQKRKKSTKEKAGPKGSKVSEEQTQPPSPAGAGMSTAMGRSPSPKTSLSAPPNXSSTENPKTVAKCQVTPRRNVLQKRPVIVKVLSTTKPFEYETPEMEKKIMFHATVATQTQFFHVKVLNTSLKEKFNGKKIIIISDYLEYDSLLEVNEESTVSEAGPNQTFEVPNKIINRAKETLKIDILHKQASGNIVYGVFMLHKKTVNQKTTIYEIQDDRGKMDVVGTGQCHNIPCEEGDKLQLFCFRLRKKNQMSKLISEMHSFIQIKKKTNPRNNDPKSMKLPQEQSQLPNPSEASTTFPESHLRTPQMPPTTPSSSFFTXLKPRLKTEPEEVSIEDSAQSDLKEVMVLNATESFVYEPKEQKKMFHATVATENEVFRVKVFNIDLKEKFTPKKIIAIANYVCRNGFLEVYPFTLVADVNADRNMEIPKGLIRSASVTPKINQLCSQTKGSFVNGVFEVHKKNVRGEFTYYEIQDNTGKMEVVVHGRLTTINCEEGDKLKLTCFELAPKSGNTGELRSVIHSHIKVIKTRKNKKDILNPDSSMETSPDFFF

SEQ ID NO: 2674 - protein, 242 aa, Homo sapiens
NMVDYYEVLGVQRHASPEDIKKAYRKLALKWHPDKNPENKEEAERKFKQVAEAYEVLSDAKKRDIYDKYGKEGLNGGGGGGSHFDSPFEFGFTFRNPDDVFREFFGGRDPFSFDFFEDPFEDFFGNRRGPRGSRSRGTGSFFSAFSGFPSFGSGFSSFDTGFTSFGSLGHGGLTSFSSTSFGGSGMGNFKSISTSTKMVNGRKITTKRIVENGQERVEVEEDGQLKSLTINGKEQLLRLDNK

SEQ ID NO: 2675 - protein, 766 aa, Homo sapiens
AISSCSEPGGARRFRRHPLWTAQGRRLMPSPRPVLLRGARAALLLLLPPRLLARPSLLLRRSLSAASCAPISLPAAASRSSMDGAGAEEVLAPLRLAVRQQGDLVRKLKEDKAPQVDVDKAVAELKARKRVLEAKELALQPKDDIVDRAKMEDTLKRRFFYDQAFAIYGGVSGLYDFGPVGCALKNNIIQTWRQHFIQEEQILEIDCTMLTPEPVLKTSGHVDKFADFMVKDVKNGECFRADHLLKAHLQKLMSDKKCSVEKKSEMESVLAQLDNYGQQELADLFVNYNVKSPITGNDLSPPVSFNLMFKTFIGPGGNMPGYLRPETAQGIFLNFKRLLEFNQGKLPFAAAQIGNSFRNEISPRSGLIRVREFTMAEIEHFVDPSEKDHPKFQNVADLHLYLYSAKAQVSGQSARKMRLGDAVEQGVINNTVLGYFIGRIYLYLTKVGISPDKLRFRQHMENEMAHYACDCWDAESKTSYGWIEIVGCADRSCYDLSCHARATKVPLVAEKPLKEPKTVNVVQFEPSKGAIGKAYKKDAKLVMEYLAICDECYITEMEMLLNEKGEFTIETEGKTFQLTKDMINVKRFQKTLYVEEVVPNVIEPSFGLGRIMYTVFEHTFHVREGDEQRTFFSFPAVVAPFKCSVLPLSQNQEFMPFVKELSEALTRHGVSHKVDDSSGSIGRRYARTDEIGVAFGVTIDFDTVNKTPHTATLRDRDSMRQIRAEISELPSIVQDLANGNITWADVEARYPLFEGQETGKKETIEE

SEQ ID NO: 2676 - protein, 126 aa, Homo sapiens
TLSSEPGQSQRTHIKTEQLSPSHYSEQQQHSPQQIAYSPFNLPHYSPSYPPITRSQYDYTDHQNSSSYYSHAAGQGTGLYSTFTYMNPAQRPMYTPIADTSGVPSIPQTHSPQHWEQPVYTQLTRP

SEQ ID NO: 2677 - protein, 222 aa, Homo sapiens
  MISC_FEATURE (38): Xaa equals any of the twenty naturally occurring L-amino acids
  MISC_FEATURE (54): Xaa equals any of the twenty naturally occurring L-amino acids
HGQHIPGVLRRAVCYMLQHPQVKGPGIGLLGISLGADXCLSMASFLKNVSATVXINGSGISGNTAINYKHSSIPPLGYDLRRIKVAFSGLVDIVDIRNALVGGYKNPSMIPIEKAQGPILLIVGQDDHNWRSELYAQTVSERLQAHGKEKPQIICYPGTGHYIEPPYFPLCPASLHRLLNKHVIWGGEPRAHSKAQEDAWKQILAFFCKHLGGTQKTAVPKL

SEQ ID NO: 2678 - protein, 231 aa, Homo sapiens
  MISC_FEATURE (166): Xaa equals any of the twenty naturally occurring L-amino acids
  MISC_FEATURE (167): Xaa equals any of the twenty naturally occurring L-amino acids
  MISC_FEATURE (172): Xaa equals any of the twenty naturally occurring L-amino acids
  MISC_FEATURE (229): Xaa equals any of the twenty naturally occurring L-amino acids
NFTVSLPEDELIQVTVTAVAITFDKNQALQTTKTPVEKSLQRASTDNEELLQFPLELCSDSLPSHPFPPAKAMTVEKASPVGDGNFRNRSAPPCANSTVGVVKMTPLSFIPGAKITKYLGIINMFFIRETTSLREEGGVSGFLHAFIAEVFAMVRAHVAALGGNAXXSYIMXQCVFMENPNKNQAQCLINVSGDAVVFVRESDLEVGSSSTTYYQLAVIMYWKAKVPPXGK

SEQ ID NO: 2679 - protein, 264 aa, Homo sapiens
ARGAAWAMVQLRPRASRAPASAEAMVDEGQLASEEEEAEHGLLLGQPSSGAAAEPLEEDEEGDDEFDDEAPEELTFASAQAEAREEERRVRETVRRDKTLLKEKRKRREELFIEQKKRKLLPDTILEKLTTASQTNIKKSPGKVKEVNLQKKNEDCEKGNDSKKVKVQKVQSVSQNKSYLAVRLKDQDLRDSRQQAAQAFIHNSLYGPGTNRTTVNKFLSLANKRLPVKRAAVQFLNNAWGIQKKQNAKRFKRRWMVRKMKTKK

SEQ ID NO: 2680 - protein, 51 aa, Homo sapiens
SESCPYKLYSWPGAVAHACNPSTLGGRGGRITRSGVRDHGETLSLLKNTKN

SEQ ID NO: 2681 - protein, 433 aa, Homo sapiens
  MISC_FEATURE (11): Xaa equals any of the twenty naturally occurring L-amino acids
FSLSIWSLSSXRYGNIILAMISEPYNHRFSDPERVNYKFESGTCSKMELIDDNTVVRARGLPWQSSDQDIARFFKGLNIAKGGAALCLNAQGRRNGEALVRFVSEEHRDLALQRHKHHMGTRYIEVYKATGEDFLKIAGGTSNEVAQFLSKENQVIVRMRGLPFTATAEEVVAFFGQHCPITGGKEGILFVTYPDGRPTGDAFVLFACEEYAQNALRKHKDLLGKRYIELFRSTAAEVQQVLNRFSSAPLIPLPTPPIIPVLPQQFVPPTNVRDCIRLRGLPYAATIEDILDFLGEFATDIRTHGVHMVLNHQGRPSGDAFIQMKSADRAFMAAQKCHKKNMKDRYVEVFQCSAEEMNFVLMGGTLNRNGLSPPPCLSPPSYTFPAPAAVIPTEAAIYQPSVILNPRALQPSTAYYPAGTQLFMNYTAYYPSV

SEQ ID NO: 2682 - protein, 80 aa, Homo sapiens
KQDPFESRRLWKNVTDSLRESEIDKATEHKHTLEERQRTEERHRTETGTPWKTKYFIKEGDGWVYHKPLWKIIPTTQPAE

SEQ ID NO: 2683 - protein, 205 aa, Homo sapiens
  MISC_FEATURE (39): Xaa equals any of the twenty naturally occurring L-amino acids
YLIRIPTMALDDFANGAAQSGVLTLNETNDIFLWYTAAXKPELQFVSKARKGLVPQRCHRFQSCAYRSNQWRYRGRCDSIQFAVDKRVFIAGFGLYGSSCGSAEYSAKIELKRQGVVLGQNLSKYFSDGSSNTFPVWFEYPVQIEPDTFYTASVILDGNELSYFGQEGMTEVQCGKVTVQFQCSSDSTNGTGVQGGQIPELIFYA

SEQ ID NO: 2684 - protein, 110 aa, Homo sapiens
LFFFFFFLFSDVILYLFLRQNLSPRLECSGMISAHCRLYLMGSSDSPASASQVVGSTGTHHHTQLIFVFLVEMGFHHVDQAGLELLTSSDPPTSASQSAGITGVSHCTWQ

SEQ ID NO: 2685 - protein, 199 aa, Homo sapiens
PQPLPPPTSMARHVFLTGPPGVGKTTLIHKASEVLKSSGVPVDGFYTEEVRQGGRRIGFDVVTLSGTRGPLSRVGLEPPPGKRECRVGQYVVDLTSFEQLALPVLRNADCSSGPGQRVCVIDEIGKMELFSQLFIQAVRQTLSTPGTIILGTIPVPKGKPLALVEEIRNRKDVKVFNVTKENRNHLLPDIVTCVQSSRK

SEQ ID NO: 2686 - protein, 343 aa, Homo sapiens
  MISC_FEATURE (87): Xaa equals any of the twenty naturally occurring L-amino acids
  MISC_FEATURE (89): Xaa equals any of the twenty naturally occurring L-amino acids
  MISC_FEATURE (93): Xaa equals any of the twenty naturally occurring L-amino acids
  MISC_FEATURE (100): Xaa equals any of the twenty naturally occurring L-amino acids
  MISC_FEATURE (114): Xaa equals any of the twenty naturally occurring L-amino acids
  MISC_FEATURE (335): Xaa equals any of the twenty naturally occurring L-amino acids
IIGMVSGIPAGCKGFPLPTGPVNGGSALIVLMAGFGIVMSSTPTGKCCRKACKRCAMRKQWLGICIAAGMLAACTSDDGQQQTVSVXQXAVCXGPIVEIXGADPRFEPLNATAXQDYQRDGKSYKIVQDPSRFSQAGLAAIYDAEPGSNLTASGEAFDPTQLTAAHPTLPIPSYARITNLANGRMIVVRINDRGPYGNDRVISLSRAAADRLNTSNNTKVRIDPIIVAQDGSLSGPGMACTTVAKQTYALPAPPDLSGGAGTSSVSGPQGDILPVSNSTLKSEDPTGAPVTSSGFLGAPTTLAPGVLEGSEPTPAPQPVVTAPSTREFRTGTAGXVYMSLTSF

SEQ ID NO: 2687 - protein, 111 aa, Homo sapiens
  MISC_FEATURE (74): Xaa equals any of the twenty naturally occurring L-amino acids
  MISC_FEATURE (81): Xaa equals any of the twenty naturally occurring L-amino acids
GCLFTFMWPEVPFLSLLLFEMESRSVTQAGVQWGDLSSWQPLPPGFKRFSCFGFLSSWGYRHPPPCPANFYIFXRRWGFTXPWLGKPGLKLLDLKVIHLPWASQRCWELQA

SEQ ID NO: 2688 - protein, 74 aa, Homo sapiens
GYKSKYLQLKKKLEDEFPGRLDICGEGTPQATGFFEVMVAGKLIHSKKKGDGYVDTESKFLKLVAAIKAALAQG

SEQ ID NO: 2689 - protein, 401 aa, Homo sapiens
  MISC_FEATURE (24): Xaa equals any of the twenty naturally occurring L-amino acids
ARGHAHASVAARPTPDVSPPRRPXSVNMANEVIKCKAAVAWEAGKPLSIEEIEVAPPKAHEVRIKIIATAVCHTDAYTLSGADPEGCFPVILGHEGAGIVESVGEGVTKLKAGDTVIPLYIPQCGECKFCLNPKTNLCQKIRVTQGKGLMPDGTSRFTCKGKTILHYMGTSTFSEYTVVADISVAKIDPLAPLDKVCLLGCGISTGYGAAVNTAKLEPGSVCAVFGLGGVGLAVIMGCKVAGASRIIGVDINKDKFARAKEFGATECINPQDFSKPIQEVLIEMTDGGVDYSFECIGNVKVMRAALEACHKGWGVSVVVGVAASGEEIATRPFQLVTGRTWKGTAFGGWKSVESVPKLVSEYMSKKIKVDEFVTHNLSFDEINKAFELMHSGKSIRTVVKI

SEQ ID NO: 2690 - protein, 357 aa, Homo sapiens
  MISC_FEATURE (319): Xaa equals any of the twenty naturally occurring L-amino acids
  MISC_FEATURE (320): Xaa equals any of the twenty naturally occurring L-amino acids
  MISC_FEATURE (325): Xaa equals any of the twenty naturally occurring L-amino acids
FSGCVGRTVPGYWGRRGGRAPSWGRGGRAGEMAARWSSENVVVEFRDSQATAMSVDCLGQHAVLSGRRFLYIVNLDAPFEGHRKISRQSKWDIGAVQWNPHDSFAHYFAASSNQRVDLYKWKDGSGEVGTTLQGHTRVISDLDWAVFEPDLLVTSSVDTYIYIWDIKDTRKPTVALSAVAGASQVKWNKKNANCLATSHDGDVRIWDKRKPSTAVEYLAAHLSKIHGLDWHPDSEHILATSSQDNSVKFWDYRQPRKYLNILPCQVPVWKARYTPFSNGLVTVMVPQLRRENSLLLWNVFDLNTPVHTFVGHDDVVLEXXWKKAXGRVQGLSTGDVVPGSDLENVAGGFPDAEALCK

SEQ ID NO: 2691 - protein, 191 aa, Homo sapiens
  MISC_FEATURE (151): Xaa equals any of the twenty naturally occurring L-amino acids
RAGLVLGHFIASGMVNQEMLNMSKKTVSCFVNFTRLQQITNIQAEIYQKNLEIELLKLEKDTADVVHPFFLAQKCHTLQSMNNHLEAVLKEKRSLRQRLLKPMCQENLPIEAVYHRYMVHLLELAVTFIERLETHLETIRNIPHLAANLKXMNQALAKMDILVTETEELAENILKWRKQQNEGFFFADPKY

SEQ ID NO: 2692 - protein, 339 aa, Homo sapiens
  MISC_FEATURE (20): Xaa equals any of the twenty naturally occurring L-amino acids
  MISC_FEATURE (92): Xaa equals any of the twenty naturally occurring L-amino acids
SGRAAAAGITLLLVSVRGSXGCSLGGSGGDTSTMSEEQFGGDGAAAAATAAVGGSAGEQEGAMVAATQGAAAAAGSGAGTGGGTASGGTEGXSAESEGAKIDASKNEEDEGHSNSSPRHSEAATAQREEWKMFIGGLSWDTTKKDLKDYFSKFGEVVDCTLKLDPITGRSRGFGFVLFKESESVDKVMDQKEHKLNGKVIDPKRAKAMKTKEPVKKIFVGGLSPDTPEEKIREYFGGFGEVESIELPMDNKTNKRRGFCFITFKEEEPVKKIMEKKYHNVGLSKCEIKVAMSKEQYQQQQQWGSRGGFAGRARGRGGDQQSGYGKVSRRGGHQNSYKPY

SEQ ID NO: 2693 - protein, 351 aa, Homo sapiens
AGAGEQAWTFPGKRPTGGHRLPAEAGQSNRGCHEESWCGTSKSSKDMESHVFLKAKTRDEYLSLVARLIIHFRDIHNKKSQASVSDPMNALQSLTGGPAAGAAGIGMPPRGPGQSLGGMGSLGAMGQPMSLSGQPPPGTSGMAPHSMAVVSTATPQTQLQLQQVALQQQQQQQQFQQQQQAALQQQQQQQQQQQFQAQQSAMQQQFQAVVQQQQQLQQQQQQQQHLIKLHHQNQQQIQQQQQQLQRIAQLQLQQQQQQQQQQQQQQQQALQAQPPIQQPPMQQPQPPPSQALPQQLQQMHHTQHHQPPPQPQQPPVAQNQPSQLPPQSQTQPLVSQAQALPGQMLYTQPPI

SEQ ID NO: 2694 - protein, 240 aa, Homo sapiens
  MISC_FEATURE (195): Xaa equals any of the twenty naturally occurring L-amino acids
DPERWKHLSKVTPPGSSVSTTPVQVVRLQSPQSQGSMMPSCNRSCSCSRGPSVEDGKWYGVRSYLHLFYEDCAGTALSDDPEGPPVLCPRRPWPSLCWKISLSSGTLLLLLGVAALTTGYAVPPKLEGIGEGEFLVLDQRAADYNQALGTCRLAGTALCVAAGVLLAICLFWAMIGWLSQDTKAEPLDPEADSHXEVFGDEPEQQLSPIFRNASGQSWFSPPASPFGQSSVQTIQPKRDS

SEQ ID NO: 2695 - protein, 384 aa, Homo sapiens
CQCGGARERRQLGAAEPREAEGAVAAATATTTTPARVPSLFPPQPPFSSLPYVPECGSTASFPAARLPPDLSARVGTMSLKLQASNVTNKNDPKSINSRVFIGNLNTALVKKSDVETIFSKYGRVAGCSVHKGYAFVQYSNERHARAAVLGENGRVLAGQTLDINMAGEPKPDRPKGLKRAASAIYSGYIFDYDYYRDDFYDRLFDYRGRLSPVPVPRAVPVKRPRVTVPLVRRVKTNVPVKLFARSTAVTTSSAKIKLKSSELQAIKTELTQIKSNIDALLSRLEQIAAEQKANPDGKKKGDGGGASGGGGGGGGSGGGGSGGGGGGGSSRPPAPQENTTSEAGLPQGEARTRDDGDEEGLLTHSEEELEHSQDTDADDGALQ

SEQ ID NO: 2696 - protein, 366 aa, Homo sapiens
  MISC_FEATURE (115): Xaa equals any of the twenty naturally occurring L-amino acids
  MISC_FEATURE (122): Xaa equals any of the twenty naturally occurring L-amino acids
  MISC_FEATURE (137): Xaa equals any of the twenty naturally occurring L-amino acids
  MISC_FEATURE (139): Xaa equals any of the twenty naturally occurring L-amino acids
  MISC_FEATURE (353): Xaa equals any of the twenty naturally occurring L-amino acids
PLEPGPVREPTAPESELEGQPTPPAPPPLPETWTPTARSSPPLPPPAEERTSAKGPETMASKFPSSSSDWRVPGQGLENRGEPPTPPSPAPAPAVAPGGSSESSSGRAAGDTPEXKEAAGTXKKVKVRPPPLKKTFXSXDNRVLSEVDFEERFAELPEFRPEEVLPSPTLQSLATSPRAILGSYRKKRKNSTDLDSAPEDPTSPKRKMRRRSSCSSEPNTPKSAKCEGDIFTFDRTEAEDVLGELEYDKVPYSSLRRTLDQRRALVMQLFQDHGFFPSAQATAAFQARYADIFPSKVCLQLKIREVRQKIMQAATPTEQPPGAEAPLPVPPPTGTAAAPAPTPSPAGALTPPXPARTLARPRLPRH

SEQ ID NO: 2697 - protein, 77 aa, Homo sapiens
VCNKISLPDDEESDEEAVKKTNKCVLVWEGTAKDRSFGEMKFKQCPTENMAREHFKKHGAEHYWDLALSESVLESTD

SEQ ID NO: 2698 - protein, 218 aa, Homo sapiens
  MISC_FEATURE (141): Xaa equals any of the twenty naturally occurring L-amino acids
GDGVSAKMSTAAVPELKQISRVEAMRLGPGWSHSCHAMLYAANPGQLFGRIPMRFSVLMQMRFDGLLGFPGGFVDRRFWSLEDGLNRVLGLGLGCLRLTEADYLSSHLTEGPHRVVAHLYARQLTLEQLHAVEISAVHSRXHGLEVLGLVRVPLYTQKDRVGGFPNFLSNAFVSTAKCQLLFALKVLNMMPEEKLVEALAAATEKQKKALEKLLPASS

SEQ ID NO: 2699 - protein, 477 aa, Homo sapiens
  MISC_FEATURE (102): Xaa equals any of the twenty naturally occurring L-amino acids
  MISC_FEATURE (112): Xaa equals any of the twenty naturally occurring L-amino acids
  MISC_FEATURE (118): Xaa equals any of the twenty naturally occurring L-amino acids
  MISC_FEATURE (270): Xaa equals any of the twenty naturally occurring L-amino acids
FCYFLVRDVSGEILRCLSLFCLHTGSVLPALRGPLWSQFQATHGPWPAPYSWLADSWPHPSRSPSAQEPRGSCCPSNPDPDDRYYNEAGISLYLAQTARGTXAPGEGPVYSXIDPAGXELQTFHGGFPQHPSGDLGPWSQYAPPEWSQGDSGAKGGKVKLLGKPVQMPSLNWPEALPPPPPSCELSCLEGPEEELEGSSEPEEWCPPMPERSHLTEPSSSGGCLVTPSRRETPSPTPSYGQQSTATLTPSPPDPPQPPTDMPHLHQMPRXVPLGPSSPLSVSQPMLGIREARPAGLGAGPAASPHLSPSPAPSTASSAPGRTWQGNGEMTPPLQGPRARFRKKPKALPYRRENSPGDLPPPPLPPPEEEASWALELRAAGSMSSLERERSGERKAVQAVPLAAQRVLHPDEEAWLPYSRPSFLSRGQGTSTCSTAGSNSSRGSSSSRGSRGPGRSRSRSQSRSQSQRPGQKRREEPR

SEQ ID NO: 2700 - protein, 281 aa, Homo sapiens
QPSTTCTSVLVCLLSAMPLPVALQTRLAKRGILKHLEPEPEEEIIAEDYDDDPVDYEATRLEGLPPSWYKVFDPSCGLPYYWNADTDLVSWLSPHDPNSVVTKSAKKLRSSNADAEEKLDRSHDKSDRGHDKSDRSHEKLDRGHDKSDRGHDKSDRDRERGYDKVDRERERDRERDRDRGYDKADREEGKERRHHRREELAPYPKSKKAVSRKDEELDPMDPSSYSDAPRGTWSTGLPKRNEAKTGADTTAAGPLFQQRPYPSPGAVLRANAEASRTKQQD

SEQ ID NO: 2701 - protein, 207 aa, Homo sapiens
  MISC_FEATURE (128): Xaa equals any of the twenty naturally occurring L-amino acids
  MISC_FEATURE (130): Xaa equals any of the twenty naturally occurring L-amino acids
  MISC_FEATURE (132): Xaa equals any of the twenty naturally occurring L-amino acids
  MISC_FEATURE (179): Xaa equals any of the twenty naturally occurring L-amino acids
GSCENSIRGNKEKGMGQARGFPVHPWLGADGLFLALQLCFVLSILGNPSVVLLDEPFTGMDPEGQQQMWQILQATVKNKERGTLLTTHYMSEAEAVCDRMAMMVSGTLRCIGSIQHLKNKFGRDYLLXIXMXEPTQVEALHTEILKLFPQAAWQERYSSLMAYKLPVEDVHPLSWAFFXLEAMKQTFNLEEYSLSQATLEQVFLELC

SEQ ID NO: 2702 - protein, 206 aa, Homo sapiens
RLPIRQSAADGLRARPLGSNTAPALRVMVQAWYMDDAPGDPRQPHRPDPGRPVGLEQLRRLGVLYWKLDADKYENDPELEKIRRERNYSWMDIITICKDKLPNYEEKIKMFYEEHLHLDDEIRYILDGSGYFDVRDKEDQWIRIFMEKGDMVTLPAGIYHRFTVDEKNYTKAMRLFVGEPVWTAYNRPADHFEARGQYVKFLAQTA

SEQ ID NO: 2703 - protein, 398 aa, Homo sapiens
  MISC_FEATURE (28): Xaa equals any of the twenty naturally occurring L-amino acids
HFERTSSKRVSRSLDGAPIGVMDQSLMXDFPGAAGEISAYGPGLVSIAVVQDGDGRREVRSPTKAPHLQLIEGKSSHETLNIVEEKKRAEVGKDERVITEEMNGKEISPGSGPGEIRKVEPVTQKDSTSLSSESSSSSSESEEEDVGEYRPHHRVTEGTIREEQEYEEEVEEEPRPAAKVVEREEAVPEASPVTQAGASVITVETVIQENVGAQKIPGEKSVHEGALKQDMGEEAEEEPQKVNGEVSHVDIDVLPQIICCSEPPVVKTEMVTISDASQRTEISTKEVPIVQTETKTITYESPQIDGGAGGDSGTLLTAQTITSESVSTTTTTHITKTVKGGISETRIEKRIVITGDGDIDHDQALAQAIREAREQHPDMSVTRVVVHKETELAEEGED

SEQ ID NO: 2704 - protein, 112 aa, Homo sapiens
DPMRVEPDFPSGTLSSQVEFVHMLNATMCATTRTICAILENYQTEKGITVPEKLKEFMPPGLQELIPFVKPAPIEQEPSKKQKKQHEGSKKKAAARDVTLENRLQNMEVTDA

SEQ ID NO: 2705 - protein, 603 aa, Homo sapiens
  MISC_FEATURE (14): Xaa equals any of the twenty naturally occurring L-amino acids
  MISC_FEATURE (17): Xaa equals any of the twenty naturally occurring L-amino acids
  MISC_FEATURE (21): Xaa equals any of the twenty naturally occurring L-amino acids
DIFSTLRSSCLYRXHSXALQXICSDLQYWPVFIQSRGFKTLKSRTRRLQSTSERLAETQNIAPSFVKGFLLRDRGSDVESLDKLMKTKNIPEAHQDAFKTGFAEGFLKAQALTQKTNDSLRRTRLILFVLLLFGIYGLLKNPFLSVRFRTTTGLDSAVDPVQMKNVTFEHVKGVEEAKQELQEVVEFLKNPQKFTILGGKLPKGILLVGPPGTGKTLLARAVAGEADVPFYYASGSEFDEMFVGVGASRIRNLFREAKANAPCVIFIDELDSVGGKRIESPMHPYSRQTINQLLAEMDGFKPNEGVIIIGATNFPEALDNALIRPGRFDMQVTVPRPDVKGRTEILKWYLNKIKFDQSVDPEIIARGTVGFSGAELENLVNQAALKAAVDGKEMVTMKELEFSKDKILMGPERRSVEIDNKNKTITAYHESGHAIIAYYTKDAMPINKATIMPRGPTLGHVSLLPENDRWNETRAQLLAQMDVSMGGRVAEELIFGTDHITTGASSDFDNATKIAKRMVTKFGMSEKLGVMTYSDTGKLSPETQSAIEQEIRILLRDSYERAKHILKTHAKEHKNLAEALLTYETLDAKEIQIVLEGKKLEVR

SEQ ID NO: 2706 - protein, 666 aa, Homo sapiens
  MISC_FEATURE (36): Xaa equals any of the twenty naturally occurring L-amino acids
  MISC_FEATURE (650): Xaa equals any of the twenty naturally occurring L-amino acids
PPIRFGPGKLAKGALIRGINFARTQRGLGVGPLGPXTSVGQAAIKLWDGQEKGLGKSREGSRTDDEVVQREEEAIQLDGLNASQIRELREKSEKFAFQAEVNRMMKLIINSLYKNKEIFLRELISNASDALDKIRLISLTDENALSGNEELTVKIKCDKEKNLLHVTDTGVGMTREELVKNLGTIAKSGTSEFLNKMTEAQEDGQSTSELIGQFGVGFYSAFLVADKVIVTSKHNNDTQHIWESDSNEFSVIADPRGNTLGRGTTITLVLKEEASDYLELDTIKNLVKKYSQFINFPIYVWSSKTETVEEPMEEEEAAKEEKEESDDEAAVEEEEEEKKPKTKKVEKTVWDWELMNDIKPIWQRPSKEVEEDEYKAFYKSFSKESDDPMAYIHFTAEGEVTFKSILFVPTSAPRGLFDEYGSKKSDYIKLYVRRVFITDDFHDMMPKYLNFVKGVVDSDDLPLNVSRETLQQHKLLKVIRKKLVRKTLDMIKKIADDKYNDTFWKEFGTNIKLGVIEDHSNRTRLAKLLRFQSSHHPTDITSLDQYVERMKEKQDKIYFMAGSSRKEAESSPFVERLLKKGYEVIYLTEPVDEYCIQALPEFDGKRFQNVAKEGVKFDESEKTKESREAVEKEFEPLLNWMKDKALKDKXEKAVEITNCGNISISI

SEQ ID NO: 2707 - protein, 44 aa, Homo sapiens
NSAEVSPGFKRFSCLSLPSSWDYRCVPLSSANFCIFSRDGVSPF

SEQ ID NO: 2708 - protein, 59 aa, Homo sapiens
SPLPEEDLSKLFKPPQPPARMDSLLIAGQINTYCQNIKEFTAQNLGKLFMAQALQEYNN

SEQ ID NO: 2709 - protein, 186 aa, Homo sapiens
  MISC_FEATURE (180): Xaa equals any of the twenty naturally occurring L-amino acids
PRSPFLQPLLIGELAPEEPSQDGPQDAQLVEDFRALRQAAEDMELFEAKPAFFALLLGHILAMEVLAWLLVYLFGPGWVPSTLAALVLATSQAQCWCLQHDLGHTSVFRKSQWNHVAQQFVMGQLKGFSAHWWNFRHFQHHAKPNIFHKDPDVTVAPVFLLGESSVEYGKKKRRYLPTIXSTCTSS

SEQ ID NO: 2710 - protein, 53 aa, Homo sapiens
ICSSVVYGVPRMQLKTCYVEEIRGVVLEDRHLWNDSHPLKLGGWRPASLRSWG

SEQ ID NO: 2711 - protein, 41 aa, Homo sapiens
PPRDPSHVPSWPGRSPTSCLYPPCPFLSAHLTRPAGPHPRL

SEQ ID NO: 2712 - protein, 244 aa, Homo sapiens
SAAMAPVRRSAKWRPGGIEARGEGVSTVGYRNKNVRQKTWRPNHPQAFVGSVREGQGFAFRRKLKIQQSYKKLLRKEKKAQTSLESQFTDRYPDNLKHLYLAEEERHRKQARKVDHPLSEQVHQPLLEEQCSIDEPLFEDQCSFDQPQPEEQCIKTVNSFTIPKKNKKKTSNQKAQEEYEQIQAKRAAKKQEFERRKQEREEAQRQYKKKKMEVFKILNKKTKKGQPNLNVQMEYLLQKIQEKC

SEQ ID NO: 2713 - protein, 447 aa, Homo sapiens
LPPSSFRVSLPARLEAAPDRDAESADPAPRRPPETRRARSGLRAGPAMAAPRPSPAISVSVSAPAFYAPQKKFGPVVAPKPKVNPFRPGDSEPPPAPGAQRAQMGRVGEIPPPPPEDFPLPPPPLAGDGDDAEGALGGAFPPPPPPIEESFPPAPLEEEIFPSPPPPPEEEGGPEAPIPPPPQPREKVSSIDLEIDSLSSLLDDMTKNDPFKARVSSGYVPPPVATPFSSKSSTKPAAGGTAPLPPWKSPSSSQPLPQVPAPAQSQTQFHVQPQPQPKPQVQLHVQSQTQPVSLANTQPRGPPASSPAPAPKFSPVTPKFTPVASKFSPGAPGGSGSQPNQKLGHPEALSAGTGSPQPPSFTYAQQREKPRVQEKQHPVPPPAQNQNQVRSPGAPGPLTLKEVEELEQLTQQLMQDMEHPQRQNVAVNELCGRCHQPLARAQQPSAL

SEQ ID NO: 2714 - protein, 125 aa, Homo sapiens
KGTPAGTGPEFPGRPTRPPTRPLAEPSGCRFSTRGFHLQRAMFQAAGAAQATPSHDAKGGGSSTVQRSKSFSLRAQVKETCAACQKTVYPMERLVADKLIFHNSCFCCKPCPPGTFSRANSSTLA

SEQ ID NO: 2715 - protein, 271 aa, Homo sapiens
FSCYCYCCCCHRHYHWAHLPRPLPAAPPPAPHKMSEDLAKQLASYKAQLQQVEAALSGNGENEDLLKLKKDLQEVIELTKDLLSTQPSETLASSDSFASTQPTHSWKVGDKCMAVWSEDGQCYEAEIEEIDEENGTAAITFAGYGNAEVTPLLNLKPVEEGRKAKEDSGNKPMSKKEMIAQQREYKKKKALKKAQRIKELEQEREDQKVKWQQFNNRAYSKNKKGQVKRSIFASPESVTGKVGVGTCGIADKPMTQYQDTSKYNVRHLMPQ

SEQ ID NO: 2716 - protein, 147 aa, Homo sapiens
  MISC_FEATURE (146): Xaa equals any of the twenty naturally occurring L-amino acids
LNLTIPCKLLLVSKVSLFNKQQAKKINESILFIRLGSIYGECPVPKPRVDRPRKVPVIQEERAMPAQLRRMEESHQEATEKEVERILGLLQTYFREDPDTPMSFFDFVVDPHSFPRTVENIFHVSFIIRDGFARIRLDQDRLPVIXK

SEQ ID NO: 2717 - protein, 272 aa, Homo sapiens
SRDWAVSRPQGWDGAAQPSHGLLGCRGPSVPRPQSRNARRTRGRTRGRTRGSRTRGSGRVGPAIERMGLSMERMVPAGMGAGLERMGPVMDRMATGLERMGANNLERMGLERMGANSLERMGLERMGANSLERMGPAMGPALGAGIERMGLAMGGGGGASFDRAIEMERGNFGGSFAGSFGGAGGHAPGVARKACQIFVRNLPFDFTWKMLKDKFNECGHVLYADIKMENGKSKGCGVVKFESPEVAERACRMMNGMKLSGREIDVRIDRNA

SEQ ID NO: 2718 - protein, 339 aa, Homo sapiens
  MISC_FEATURE (3): Xaa equals any of the twenty naturally occurring L-amino acids
  MISC_FEATURE (7): Xaa equals any of the twenty naturally occurring L-amino acids
  MISC_FEATURE (33): Xaa equals any of the twenty naturally occurring L-amino acids
  MISC_FEATURE (116): Xaa equals any of the twenty naturally occurring L-amino acids
TSXEDPXGGGQDPRGPDPGDEAEALTGRGGAGXQLEQTKRVKANLEKAKQTLENERGELANEVKVLLQGKGDSEHKRKKVEAQLQELQVKFNEGERVRTELADKVTKLQVELDNVXGLLSQSDSKSSKLTKDFSALESQLQDTQELLQEENRQKLSLSTKLKQVEDEKNSFREQLEEEEEAKHNLEKQIATLHAQVADMKKKMEDSVGCLETAEEVKRKLQKDLEGLSQRHEEKVAAYDKLEKTKTRLQQELDDLLVDLDHQRQSACNLEKKQKKFDQLLAEEKTISAKYAEERDRAEAEAREKETKALSLARALEEAMEQKADWSGSTSSSARRWRTL

SEQ ID NO: 2719 - protein, 90 aa, Homo sapiens
SARLGLPKYWDYPREPPRPAANNLSFFLRQSLALLPRLECSGTISAHGTLRLPGSRHSPASASRVAGTTGARHHARLTFCVFSRDGVSPC

SEQ ID NO: 2720 - protein, 237 aa, Homo sapiens
  MISC_FEATURE (3): Xaa equals any of the twenty naturally occurring L-amino acids
ENXLGCRNNNSTASSNNAYNVNSSQPLGSYNIGSLSSGTGAGAITMAAAQAVQATAQMKEGRRTSSLKASYEAFKNNDFQLGKEFSMARETVGYSSSSALMTTLTQNASSSAADSRSGRKSKNNNKSSSQQSSSSSSSSSLSSCSSSSTVVQEISQQTTVVPESDSNSQVDWTYDPNEPRYCICNQVSYGEMVGCDNQDCPIEWFHYGCVGLTEAPKGKWYCPQCTAAMKRRGSRHK

SEQ ID NO: 2721 - protein, 335 aa, Homo sapiens
  MISC_FEATURE (12): Xaa equals any of the twenty naturally occurring L-amino acids
  MISC_FEATURE (114): Xaa equals any of the twenty naturally occurring L-amino acids
STHASGGPRRAXVSVTALPPGSRRRMLVVEVANGRSLVWGAEAVQALRERLGVGGRTVGALPRGPRQNSRLGLPLLLMPEEARLLAEIGAVTLVSAPRPDSRHHSLALTSFKRXQEESFQEQSALAAEARETRRQELLEKITEGQAAKKQKLEQASGASSSQEAGSSQAAKEDETSDGQASGEQEEAGPSSSQAGPSNGVAPLPRSALLVQLATARPRPVKARPLDWRVQSKDWPHAGRPAHELRYSIYRDLWERGFFLSAAGKFGGDFLVYPGDPLRFHAHYIAQCWAPEDTIPLQDLVAAGRLGTSVRKTLLLCSPQPDGKVVYTSLQWASLQ

SEQ ID NO: 2722 - protein, 394 aa, Homo sapiens
KYACRYRSGIPGSTHASATFPREWLCDRHLREKMFSSVAHLARANPFNTPHLQLVHDGLGDLRSSSPGPTGQPRRPRNLAAAAVEEYSCEFGSAKYYALCGFGGVLSCGLTHTAVVPLDLVKCRMQVDPQKYKGIFNGFSVTLKEDGVRGLAKGWAPTFLGYSMQGLCKFGFYEVFKVLYSNMLGEENTYLWRTSLYLAASASAEFFADIALAPMEAAKVRIQTQPGYANTLRDAAPKMYKEEGLKAFYKGVAPLWMRQIPYTMMKFACFERTVEALYKFVVPKPRSECSKPEQLVVTFVAGYIAGVFCAIVSHPADSVVSVLNKEKGSSASLVLKRLGFKGVWKGLFARIIMIGTLTALQWFIYDSVKVYFRLPRPPPPEMPESLKKKLGLTQ

SEQ ID NO: 2723 - protein, 140 aa, Homo sapiens
  MISC_FEATURE (16): Xaa equals any of the twenty naturally occurring L-amino acids
  MISC_FEATURE (24): Xaa equals any of the twenty naturally occurring L-amino acids
  MISC_FEATURE (29): Xaa equals any of the twenty naturally occurring L-amino acids
  MISC_FEATURE (35): Xaa equals any of the twenty naturally occurring L-amino acids
  MISC_FEATURE (40): Xaa equals any of the twenty naturally occurring L-amino acids
  MISC_FEATURE (41): Xaa equals any of the twenty naturally occurring L-amino acids
  MISC_FEATURE (45): Xaa equals any of the twenty naturally occurring L-amino acids
  MISC_FEATURE (58): Xaa equals any of the twenty naturally occurring L-amino acids
  MISC_FEATURE (67): Xaa equals any of the twenty naturally occurring L-amino acids
  MISC_FEATURE (75): Xaa equals any of the twenty naturally occurring L-amino acids
  MISC_FEATURE (91): Xaa equals any of the twenty naturally occurring L-amino acids
  MISC_FEATURE (94): Xaa equals any of the twenty naturally occurring L-amino acids
  MISC_FEATURE (96): Xaa equals any of the twenty naturally occurring L-amino acids
  MISC_FEATURE (115): Xaa equals any of the twenty naturally occurring L-amino acids
  MISC_FEATURE (129): Xaa equals any of the twenty naturally occurring L-amino acids
  MISC_FEATURE (131): Xaa equals any of the twenty naturally occurring L-amino acids
  MISC_FEATURE (140): Xaa equals any of the twenty naturally occurring L-amino acids
CVFEILKVEMIPSLYXLFQKIKAXITLPXSFCEAXITLIXXPGKXITRKENYRSIFPXNTDAEILKXLANQECKXCSTFDIQCNPLHALAXQRXNXIISIGTEKAFDKIQYPFMXKPLNTEGIQENLLXLXKNYYKKPYX

SEQ ID NO: 2724 - protein, 190 aa, Homo sapiens
NSARAEPSWLVPFSAVVPAPGGPEDVWARGGPEIRKRRGSSLQVCGAKCRGGAPRVKNPEEETARIGPGVMESKEELAANNLNGENAQQENEGGEQAPTQNEEESRHLGGGEGQKPGGNIRRGRVRRLVPNFRWAIPNRHIEHNEARDDVERFVGQMMEIKRKTREQQMRHYMRFQTPEPDNHYDFCLIP

SEQ ID NO: 2725 - protein, 348 aa, Homo sapiens
AEGRILASPVRVPSSHTGAMEVAEPSSPTEEEEEEEEHSAEPRPRTRSNPEGAEDRAVGAQASVGSRSEGEGEAASADDGSLNTSGAGPKSWQVPPPAPEVQIRTPRVNCPEKVIICLDLSEEMSLPKLESFNGSKTNALNVSQKMIEMFVRTKHKIDKSHEFALVVVNDDTAWLSGLTSDPRELCSCLYDLETASCSTFNLEGLFSLIQQKTELPVTENVQTIPPPYVVRTILVYSRPPCQPQFSLTEPMKKMFQCPYFFFDVVYIHNGTEEKEEEMSWKDMFAFMGSLDTKGTSYKYEVALAGPALELHNCMAKLLAHPLQRPCQSHASYSLLEEEDEAIEVEATV

SEQ ID NO: 2726 - protein, 124 aa, Homo sapiens
RRMTTATRQEVLGLYRSIFRLARKWQATSGQMEDTIKEKQYILNEARTLFRKNKNLTDTDLIKQCIDECTARIEIGLHYKIPYPRPIHLPPMGLTPLRGRGLRSQEKLRKLSKPVYLRSHDEVS

SEQ ID NO: 2727 - protein, 147 aa, Homo sapiens
  MISC_FEATURE (126): Xaa equals any of the twenty naturally occurring L-amino acids
  MISC_FEATURE (128): Xaa equals any of the twenty naturally occurring L-amino acids
LSSFLGAIELVSDRARFCMSKPLSYMTWLFLLPSPLVFVSLFSPLALPGSPLALPRGWFSAWALADVSVAAGHTDRSGLGSVLRDLVKPGDENLREMNKKLQNMLEEQLTKNMHLHKDMEVLSQEXVXLSKECVGPPDPDLEPGETS

SEQ ID NO: 2728 - protein, 32 aa, Homo sapiens
TYPIVFFINKYFFFFFFFFFFFFFFFFFFFFF

SEQ ID NO: 2729 - protein, 204 aa, Homo sapiens
  MISC_FEATURE (87): Xaa equals any of the twenty naturally occurring L-amino acids
  MISC_FEATURE (120): Xaa equals any of the twenty naturally occurring L-amino acids
FSKLIMKTFIIGISGVTNSGKTTLAKNLQKHLPNCSVISQDDFFKPESEIETDKNGFLQYDVLEALNMEKMMSAISCWMESARHSVXSTDQESAEEIPILIIEGFLLFNYKPLDTIWNRXYFLTIPYEECKRRRSTRVYQPPDSPGYFDGHVWPMYLKYRQEMQDITWEVVYLDGTKSEEDLFLQVYEDLIQELAKQKCLQVTA

SEQ ID NO: 2730 - protein, 671 aa, Homo sapiens
  MISC_FEATURE (5): Xaa equals any of the twenty naturally occurring L-amino acids
  MISC_FEATURE (9): Xaa equals any of the twenty naturally occurring L-amino acids
IVTRXKERXSSRDKELYAWMKCVKGQPHDHKHLMPTQIIPGSVLTDLLDAMHTLREKYGIKSHCHCTNKQNLQVGNFPTMNGVSQVLQNVLNHSNKISLCMPESQQQNTPPKSEKNGGSSPESDVGTDNKLTPPESQSPLHWLADLAEQKAREEKKENKELTLENQIKEEREQDNSESPNGRTSPLVSQNNEQGSTLRDLLTTTAGKLRVGSTDAGIAFAPVYSMGAPSSKSGRTMPNILDDIIASVVENKIPPSKTSKINVKPELKEEPEESIISAVDENNKLYSDIPHSWICEKHILWLKDYKNSSNWKLFKECWKQGQPAVVSGVHKKMNISLWKAESISLDFGDHQADLLNCKDSIISNANVKEFWDGFEEVSKRQKNKSGETVVLKLKDWPSGEDFKTMMPARYEDLLKSLPLPEYCNPEGKFNLASHLPGFFVRPDLGPRLCSAYGVVAAKDHDIGTTNLHIEVSDVVNILVYVGIAKGNGILSKAGILKKFEEEDLDDILRKRLKDSSEIPGALWHIYAGKDVDKIREFLQKISKEQGLEVLPEHDPIRDQSWYVNKKLRQRLLEEYGVRTCTLIQFLGDAIVLPAGALHQVQNFHSCIQVTEDFVSPEHLVESFHLTQELRLLKEEINYDDKLQVKNILYHAVKEMVRALKIHEDEVDDMEEN

SEQ ID NO: 2731 - protein, 495 aa, Homo sapiens
  MISC_FEATURE (415): Xaa equals any of the twenty naturally occurring L-amino acids
  MISC_FEATURE (443): Xaa equals any of the twenty naturally occurring L-amino acids
LLHDTRCWLNGGAMPEARHPRTGASALHVAAAKGYIEVMRLLLQAGYDPELRDGDGWTPLHAAAHWGVEDACRLLAEHGGGMDSLTHAGQRPCDLADEEVLSLLEELARKQEDLRNQKEASQSRGQEPQAPSSSKHRRSSVCRLSSREKISLQDLSKERRPGGAGGPPIQDEDEGEEGPTEPPPAEPRTLNGVSSPPHPSPKSPVQLEEAPFSRRFGLLKTGSSGALGPPERRTAEGAPGAGLQRSASSSWLEGTSTQAKELRLARITPTPSPKLPEPSVLSEVTKPPPCLENSSPPSRIPEPESPAKPNVPTASTAPPADSRDRRRSYQMPVRDEESESQRKARSRLMRQSRRSTQGVTLTDLKEAEKAAGKAPESEKPAQSLDPSRRPRVPGVENSDSPAQREAPDGQGPGPXAAREHRKVGKEWRGPAEGEEADRLTAAXSPAPWRAAPRPAGSGGSGTSTQNLSQNRKSQTEALGRCMQSCAGRTSGFARP

SEQ ID NO: 2732 - protein, 210 aa, Homo sapiens
QYFMTMDGDSSTTDASQLGISADYIGGSHYVIQPHDDTEDSMNDHEDTNGSKESFREQDIYLPIANVARIMKNAIPQTGKIAKDAKECVQECVSEFISFITSEASERCHQEKRKTINGEDILFAMSTLGFDSYVEPLKLYLQKFREAMKGEKGIGGAVTATDGLSEELTEEAFTNQLPAGLITTDGQQQNVMVYTTSYQQISGVQQIQFS

SEQ ID NO: 2733 - protein, 261 aa, Homo sapiens
  MISC_FEATURE (38): Xaa equals any of the twenty naturally occurring L-amino acids
  MISC_FEATURE (41): Xaa equals any of the twenty naturally occurring L-amino acids
  MISC_FEATURE (119): Xaa equals any of the twenty naturally occurring L-amino acids
  MISC_FEATURE (228): Xaa equals any of the twenty naturally occurring L-amino acids
LKVFVPHLHLLYCWEMFWIVFLWISVTQYSLLWKKMLXTWXSNTFYSAGKNYLLRMCNDLLRRLSKSQNTVFCGRIQLFLARLFPLSEKSGLNLQSQFNLENVTVFNTNEQESTLGQKXTEDREEGMDVEEGEMGDEEAPTTCSIPIDYNLYRKFWSLQDYFRNPVQCYEKISWKTFLKYSEEVLAVFKSYKLDDTQASRKKMEELKTGGEHVYFAKFLTSEKLMDLXLSDSNFRRHILLQYLILFQYLKGQVKFKSSTMF

SEQ ID NO: 2734 - protein, 178 aa, Homo sapiens
  MISC_FEATURE (39): Xaa equals any of the twenty naturally occurring L-amino acids
AFFSVGILVTTRINLLLTHLIFNISASLAYYCHPPTSWXPPPYFNESIVVDMKSGFNLEELEKNNAQSIRAIKGPHLANSILFQSSGLTNGIIEEKDIHEELPKRKERKQEEREDDKDSDQETVDEEVDENSSGMFAAEETGEALSEETTAGEQSTRSFILDKIIEEDDAYDFSTDYV

SEQ ID NO: 2735 - protein, 37 aa, Homo sapiens
  MISC_FEATURE (36): Xaa equals any of the twenty naturally occurring L-amino acids
LESQLPGRLRQENHLNPGGGGCSEPRSCHCTPAWAXE

SEQ ID NO: 2736 - protein, 175 aa, Homo sapiens
  MISC_FEATURE (164): Xaa equals any of the twenty naturally occurring L-amino acids
TEEKMSLYDDLGVETSDSKTEGWSKNFKLLQSQLQVKKAALTQAKSQRTKQSTVLAPVIDLKRGGSSDDRQIVDTPPHVAAGLKDPVPSGFSAGEVLIPLADEYDPMFPNDYEKVVKRQREERQRQRELERQKEIEEREKRRKDRHEASGFARRPDPDSDEDEXYERERRKRSKA

SEQ ID NO: 2737 - protein, 140 aa, Homo sapiens
  MISC_FEATURE (8): Xaa equals any of the twenty naturally occurring L-amino acids
STHASAPXCRGAASRGLLCKWAPWPSAPVPATRDRAPRPARGRRPDPTSQQAKAWRPSPPAARSWPPTTTTGAAWVPLPATAPAAVPSAPGKPFPTPQVSPRLTRVIGGPASFSGSPPSRSWPRCWSPQSTRNLPRPPAA

SEQ ID NO: 2738 - protein, 339 aa, Homo sapiens
  MISC_FEATURE (63): Xaa equals any of the twenty naturally occurring L-amino acids
  MISC_FEATURE (120): Xaa equals any of the twenty naturally occurring L-amino acids
  MISC_FEATURE (330): Xaa equals any of the twenty naturally occurring L-amino acids
  MISC_FEATURE (331): Xaa equals any of the twenty naturally occurring L-amino acids
EDEASNPFSFWVGENTNNLFRPRVREEANIRSKLRTNREDCFESESEDEFYKQSWVLPGEEAXSRFRHRDKEDPNTALKLRAQKDVDSDRVKQEPRFEEEVIIGSWFWAEKEASLEGGAXAICESEPGTEEGAIGGSAYWAEEKSSLGAVAREEAKPESEEEAIFGSWFWDRDEACFDLNPCPVYKVSDRFRDAAEELNASSRPQTWDEVTVEFKPGLFHGVGFRSTSPFGIPEEASEMLEAKPKNLELSPEGEEQESLLQPDQPSPEFTFQYDPSYRSVREIREHLRARESAESESWSCSCIQCELKIGSEEFEEFLLLMDKIRGSFYXXNILKLQWV

SEQ ID NO: 2739 - protein, 81 aa, Homo sapiens
RPRPAVHMDVRGPEAPGGRALRDAAENLFQELQEHFQALTATLNLRMEEMGNRIEDLQKNVNDLMVQAGIENSIKEQMLKT

SEQ ID NO: 2740 - protein, 270 aa, Homo sapiens
  MISC_FEATURE (254): Xaa equals any of the twenty naturally occurring L-amino acids
  MISC_FEATURE (255): Xaa equals any of the twenty naturally occurring L-amino acids
  MISC_FEATURE (257): Xaa equals any of the twenty naturally occurring L-amino acids
  MISC_FEATURE (258): Xaa equals any of the twenty naturally occurring L-amino acids
  MISC_FEATURE (268): Xaa equals any of the twenty naturally occurring L-amino acids
THCHPSDSPAQKKKKMVEADRPGKLFIGGLNTETNEKALEAVFGKYGRIVEVLLMKDRETNKSRGFAFVTFESPADAKDAARDMNGKSLDGKAIKVEQATKPSFESGRRGPPPPPRSRGPPRGLRGGRGGSGGTRGPPSRGGHMDDGGYSMNFNMSSSRGPLPVKRGPPPRSGGPPPKRSAPSGPVRSSSGMGGRAPVSRGRDSYGGPPRREPLPSRRDVYLSPRDDGYSTKDSYSSRDYPSSRDTRDYAPPPXXSXXARANSSTLAXVT

SEQ ID NO: 2741 - protein, 327 aa, Homo sapiens
  MISC_FEATURE (289): Xaa equals any of the twenty naturally occurring L-amino acids
  MISC_FEATURE (297): Xaa equals any of the twenty naturally occurring L-amino acids
  MISC_FEATURE (314): Xaa equals any of the twenty naturally occurring L-amino acids
ATHYGQWDFGTRLCPGNTGILLFLVLLTSVTLLSIYSINLLLICSKETGCMVYEKLGEQVFGTTGKFVIFGATSLQNTGAMLSYLFIVKNELPSAIKFLMGKEETFSAWYVDGRVLVVIVTFGIILPLCLLKNLGYLGYTSGFSLSCMVFFLIVVIYKKFQIPCIVPELNSTISANSTNADTCTPKYVTFNSKTVYALPTIAFAFVCHPSVLPIYSELKDRSQKKMQMVSNISFFAMFVMYFLTAIFGYLTFYDNVQSDLLHKYQSKDDILILTVRLAVIVAVILTVPXLFFTVRSXLFELAKKTKFNLCPSYXWLPAYSWLLSTCW

SEQ ID NO: 2742 - protein, 59 aa, Homo sapiens
SLKWDQPISSTQESGRLEAGGASPKLRWDHVDSGGTRRPGVYLKGTERPWARSPIGETW

SEQ ID NO: 2743 - protein, 31 aa, Homo sapiens
LGDLLAWDLCEGTLLLWCDIIGQTTYRDLKL

SEQ ID NO: 2744 - protein, 20 aa, Homo sapiens
EAEAGGSPEVRSLRPTWPTW

SEQ ID NO: 2745 - protein, 249 aa, Homo sapiens
  MISC_FEATURE (216): Xaa equals any of the twenty naturally occurring L-amino acids
  MISC_FEATURE (221): Xaa equals any of the twenty naturally occurring L-amino acids
  MISC_FEATURE (223): Xaa equals any of the twenty naturally occurring L-amino acids
  MISC_FEATURE (237): Xaa equals any of the twenty naturally occurring L-amino acids
  MISC_FEATURE (244): Xaa equals any of the twenty naturally occurring L-amino acids
PHYYLTAWRTLQDDPRALGARGHRRSVSRGSYQLQAQMNRAVYEDRPPGSVVPTSAAEASRAMAGDTSLSENYAFAGMYHVFDQHVDEAVPRVRFANDDRHRLACCSLDGSISLCQLVPAPPTVLRVLRGHTRGVSDFAWSLSNDILVSTSLDATMRIWASEDGRCIREIPDPDSAELLCCTFQPVNNNLTVVGNAKHNVHVMNISTGKKVKGGFXQADRXVXLLCPLMPLAGCSGXVDDRGKXLLFPL

SEQ ID NO: 2746 - protein, 90 aa, Homo sapiens
LRLRIHRCLPHSTLTNFTRASMNTLPATISQAAKPCLSPVAVWQMLLTRLLEQHYGLTLNDTPFSDETVIKEHIDAGITLADAVNFLVEK

SEQ ID NO: 2747 - protein, 189 aa, Homo sapiens
AGVQQEEPETIPERTPADLEFSRLRFREFVYQEAAGPHQTLARLHELCRQWLMPEARSKEQMLELLVLEQFLGILPDKVRPWVVAQYPESCKKAASLVEGLADVLEEPGMLLGSPAGSSSILSDGVYERHMDPLLLPGELASPSRPLELGRSRHLLRHPGFLRTPCFWNRGGSEKQRPKRTALPTPSRS

SEQ ID NO: 2748 - protein, 528 aa, Homo sapiens
  MISC_FEATURE (403): Xaa equals any of the twenty naturally occurring L-amino acids
  MISC_FEATURE (511): Xaa equals any of the twenty naturally occurring L-amino acids
  MISC_FEATURE (527): Xaa equals any of the twenty naturally occurring L-amino acids
PNGGRQAPGGWTSVASCHGPVEEEERAPEAPRRGLPGPRQHSEDGEFEIQAEDDARARKLGPGRPLPTFPTSECTSDVEPDTREMVRAQNKKKKKSGGFQSMGLSYPVFKGIMKKGYKVPTPIQRKTIPVILDGKDVVAMARTGSGKTACFLLPMFERLKTHSAQTGARALILSPTRELALQTLKFTKELGKFTGLKTALILGGDRMEDQFAALHENPDIIIATPGRLVHVAVEMSLKLQSVEYVVFDEADRLFEMGFAEQLQEIIARLPGGHQTVLFSATLPKLLVEFARAGLTEPVLIRLDVDTKLNEQLKTSFFLVREDTKAAVLLHLLHNVVRPQDQTVVFVATKHHAEYLTELLTTQRVSCAHIYSALDPTARKINLAKFTLGKCSTLIVTDLAARGXDIPLLDNVINYSFPAKGKLFLHRVGRVARAGRSGTATPWWPLMKSPTCWICTCSWAAPSPSPDPSRSPQVWPVWMACWVGCHRVWWTRRTVVCRAPWRHRWSYGAWPXLLITPSSSMCAHARRXR

SEQ ID NO: 2749 - protein, 366 aa, Homo sapiens
  MISC_FEATURE (197): Xaa equals any of the twenty naturally occurring L-amino acids
PTRPPTRPPTRPTEASLLRQCPLLLPQNRSKTVYEGFISAQGRDFHLRIVLPEDLQLKNARLLCSWQLRTILSGYHRIVQQRMQHSPDLMSFMMELKMLLEVALKNRQELYALPPPPQFYSSLIEEIGTLGWDKLVYADTCFSTIKLKAEDASGREHLITLKLKAKYPAESPDYFVDFPVPFCASWTPQVNSPQSSXISIYSQFLAAIESLKAFWDVMDEIDEKTWVLEPEKPPRSATARRIALGNNVSINIEVDPRHPTMLPECFFLGADHVVKPLGIKLSRNIHLWDPENSVLQNLKDVLEIDFPARAILEKSDFTMDCGICYAYQLDGTIPDQVCDNSQCGQPFHQICLYEVKNKNIVKTFFR

SEQ ID NO: 2750 - protein, 280 aa, Homo sapiens
ADAWADAWADAWVSPVSRQSIRNSQKHSPTSEPTPPGDALPPVSSPHTHRGYQPTPAMAKYVKILYDFTARNANELSVLKDEVLEVLEDGRQWWKLRSRSGQAGYVPCNILGEARPEDAGAPFEQAGQKYWGPASPTHKLPPSFPGNKDELMQHMDEVNDELIRKISNIRAQPQRHFRVERSQPVSQPLTYESGPDEVRAWLEAKAFSPRIVENLGILTGPQLFSLNKEELKKVCGEEGVRVYSQLTMQKAFLEKQQSGSELEELMNKFHSMNQRRGEDS

SEQ ID NO: 2751 - protein, 315 aa, Homo sapiens
KKAVKAVLWVSADGLRVVDEKTKDLIVDQTIEKVSFCAPDRNFDRAFSYICRDGTTRRWICHCFMAVKDTGERLSHAVGCAFAACLERKQKREKECGVTATFDASRTTFTREGSFRVTTATEQAEREEIMKQMQDAKKAETDKIVVGSSVAPGNTAPSPSSPTSPTSDATTSLEMNNPHAIPRRHAPIEQLARQGSFRGFPALSQKMSPFKRQLSLRINELPSTMQRKTDFPIKNAVPEVEGEAESISSLCSQITNAFSTPEDPFSSAPMTKPVTVVAHNLLPSKGPSGVNLLVLPLQVSSRPVIDVLPLRPTDG

SEQ ID NO: 2752 - protein, 122 aa, Homo sapiens
  MISC_FEATURE (3): Xaa equals any of the twenty naturally occurring L-amino acids
  MISC_FEATURE (71): Xaa equals any of the twenty naturally occurring L-amino acids
CGXVLALTMLCLTEGAKDECNVVEVVARNHDHQEIAVPVANLKLSCQPMLSLDDFQLQPPVTFRLKSGSGXVRITGRHQIVTMSNDVSEEESEEEEEDSDEEEVELCPILPAKKLGGQALAS

SEQ ID NO: 2753 - protein, 301 aa, Homo sapiens
GGMDLSELERDNTGRCRLSSPVPAVCRKEPCVLGVDEAGRGPVLGPMVYAICYCPLPRLADLEALKVADSKTLLESERERLFAKMEDTDFVGWALDVLSPNLISTSMLGRVKYNLNSLSHDTATGLIQYALDQGVNVTQVFVDTVGMPETYQARLQQSFPGIEVTVKAKADALYPVVSAASICAKVARDQAVKKWQFVEKLQDLDTDYGSGYPNDPKTKAWLKEHVEPVFGFPQFVRFSWRTAQTILEKEAEDVIWEDSASENQEGLRKITSYFLNEGSQARPRSSHRYFLERGLESATSL

SEQ ID NO: 2754 - protein, 142 aa, Homo sapiens
LCLLQTCGHDIFLSQSVINKAMQLVARQRAKGEVLNCLRAFLNWEKNAPVDVGFMVSKLLLTIQLCPKTEFQPSEKFGEDLSDNTWEYIFAIDLLCCHQKWIWTHDNIISKELWPVMDKWIKYRKGHANIAYTPDIIIASNY

SEQ ID NO: 2755 - protein, 82 aa, Homo sapiens
CQSIQDSQQVTEVSLTTLVNFVDITQKPQPPRGQPKMDWKWPFDFFPFKVAFSRGVFSQKCSVSPILILCLLLLGVLNLETM

SEQ ID NO: 2756 - protein, 200 aa, Homo sapiens
LGSIQVMQAVRNAGSRFLRSWTWPQTAGRVVARTPAGTICTGARQLQDAAAKQKVEQNAAPSHTKFSIYPPIPGEESSLRWAGKKFEEIPIAHIKASHNNTQIQVVSASNEPLAFASCGTEGFRNAKKGTGIAAQTAGIAAAARAKQKGVIHIRVVVKGLGPGRLSAMHGLIMGGLEVISITDNTPIPHNGCRPRKARKL

SEQ ID NO: 2757 - protein, 97 aa, Homo sapiens
SCGLSLIKMTTSQKHRDFVAEPMGEKPVGSLAGIGEVLGKKLEERGFDKAYVVLGQFLVLKKDEDLFREWLKDTCGANAKQSRDCFGCLREWCDAFL

SEQ ID NO: 2758 - protein, 229 aa, Homo sapiens
WQTRDLNSGLHSQQKNMAQETNQTPGPMLCSTGCGFYGNPRTNGMCSVCYKEHLQRQQNSGRMSPMGTASGSNSPTSDSASVQRADTSLNNCEGAAGSTSEKSRNVPVAALPVTQQMTEMSISREDKITTPKTEVSEPVVTQPSPSVSQPSTSQSEEKAPELPKPKKNRCFMCRKKVGLTGFDCRCGNLFCGLHRYSDKHNCPYDYKAEAAAKIRKENPVVVAEKIQRI

SEQ ID NO: 2759 - protein, 328 aa, Homo sapiens
IRMREWWVQVGLLAVPLLAAYLHIPPPQLSPALHSWKSSGKFFTYKGLRIFYQDSVGVVGSPEIVVLLHGFPTSSYDWYKIWEGLTLRFHRVIALDFLGFGFSDKPRPHHYSIFEQASIVEALLRHLGLQNRRINLLSHDYGDIVAQELLYRYKQNRSGRLTIKSLCLSNGGIFPETHRPLLLQKLLKDGGVLSPILTRLMNFFVFSRGLTPVFGPYTRPSESELWDMWAGIRNNDGNLVIDSLLQYINQRKKFRRRWVGALASVTIPIHFIYGPLDPVNPYPEFLELYRKTLPRSTVSILDDHISHYPQLEDPMGFLNAYMGFINSF

SEQ ID NO: 2760 - protein, 113 aa, Homo sapiens
NLAVTEDSASSVDISSGGCLFSPISSTTGPDSGAGAFVLDPMCGLGTILLEAAKEWPDVYYVGADVSDSQLLGTWDNLKAAGLEDKIELLKISVIELPLPSESVDIIISDIPF

SEQ ID NO: 2761 - protein, 261 aa, Homo sapiens
  MISC_FEATURE (40): Xaa equals any of the twenty naturally occurring L-amino acids
  MISC_FEATURE (43): Xaa equals any of the twenty naturally occurring L-amino acids
  MISC_FEATURE (80): Xaa equals any of the twenty naturally occurring L-amino acids
  MISC_FEATURE (114): Xaa equals any of the twenty naturally occurring L-amino acids
  MISC_FEATURE (138): Xaa equals any of the twenty naturally occurring L-amino acids
  MISC_FEATURE (141): Xaa equals any of the twenty naturally occurring L-amino acids
  MISC_FEATURE (142): Xaa equals any of the twenty naturally occurring L-amino acids
  MISC_FEATURE (158): Xaa equals any of the twenty naturally occurring L-amino acids
  MISC_FEATURE (184): Xaa equals any of the twenty naturally occurring L-amino acids
  MISC_FEATURE (192): Xaa equals any of the twenty naturally occurring L-amino acids
  MISC_FEATURE (197): Xaa equals any of the twenty naturally occurring L-amino acids
  MISC_FEATURE (199): Xaa equals any of the twenty naturally occurring L-amino acids
  MISC_FEATURE (200): Xaa equals any of the twenty naturally occurring L-amino acids
  MISC_FEATURE (231): Xaa equals any of the twenty naturally occurring L-amino acids
  MISC_FEATURE (240): Xaa equals any of the twenty naturally occurring L-amino acids
  MISC_FEATURE (248): Xaa equals any of the twenty naturally occurring L-amino acids
  MISC_FEATURE (250): Xaa equals any of the twenty naturally occurring L-amino acids
YAKLPDQWTGSCVIGTIKPSFFLVPIKTGKLLGFPVCASXEKXSIAIGDWKDDEWPPEKILQYYGPATWSQDVSWGYGTXIYMLNRIIWLQAVLEIITNKTTQALTVLAWQETXMRNAIYQNRLALDYLLAAEGGVCXKFXXTNYCLHIDDQGQVVEXIVKDITKLAHVPVQVWHGLSPGAMFXNWFPAIGXFKTLXIXXIIVIGTCLLLPCLIPVFLQMIKNFVATLVHXNASAQAYYXNHYQSIAXKXISSKNKSENSH

SEQ ID NO: 2762 - protein, 201 aa, Homo sapiens
  MISC_FEATURE (37): Xaa equals any of the twenty naturally occurring L-amino acids
  MISC_FEATURE (146): Xaa equals any of the twenty naturally occurring L-amino acids
  MISC_FEATURE (169): Xaa equals any of the twenty naturally occurring L-amino acids
  MISC_FEATURE (174): Xaa equals any of the twenty naturally occurring L-amino acids
HLVLTAQSMFQIPEFEPSEQEDSSSAERGLGPSPAGXGPSGSGKHHRQAPGLLWDASHQQEQPTSSSHHGGAGAVEIRSRHSSYPAGTEDDEGMGEEPSPFRGRSRSAPPNLWAAQRYGRELRRMSDEFVDSFKKGLPRPKSAGTXTQMRQSSSWTRVFQSWWDRNLGXGSPPXPVTFAPHPETPPGPTALGSHLEYGRKY

SEQ ID NO: 2763 - protein, 375 aa, Homo sapiens
  MISC_FEATURE (15): Xaa equals any of the twenty naturally occurring L-amino acids
  MISC_FEATURE (148): Xaa equals any of the twenty naturally occurring L-amino acids
ENAIETMQLTNDKIXSMVQQHLDDPSLPINPLSMLLNGIVDPAVMGGFANYEKAFFTDRYLQEHPEAHEKIEKLKDLIAWQIPFLAEGIRIHGDKVTEALRPFHERMEACFKQLKEKVEKEYGVRIMPSSLDDRRGSRPRSMVRSFTXPSSSRPLSVASVSSLSSDSTPSRPGSDGFALEPLLPKKMHSRSQDKLDKDDLEKEKKDKKKEKRNSKHQEIFEKEFKPTDISLQQSEAVILSETISPLRPQRPKSQVMNVIGSERRFSVSPSSPSSQQTPPPVTPRAKLSFSMQSSLELNGMTGADVADVPPPLPLKGSVADYGNLMENQDLLGSPTPPPPPPHQRHLPPPLPSKTPPPPPPKTTRKQTSVDSGIVQ

SEQ ID NO: 2764 - protein, 117 aa, Homo sapiens
  MISC_FEATURE (48): Xaa equals any of the twenty naturally occurring L-amino acids
  MISC_FEATURE (60): Xaa equals any of the twenty naturally occurring L-amino acids
  MISC_FEATURE (76): Xaa equals any of the twenty naturally occurring L-amino acids
  MISC_FEATURE (109): Xaa equals any of the twenty naturally occurring L-amino acids
EKIVQKENLYPRVNLMTANERDAAEKPGDFARTLDPKQRIGATDCSEXLMFLMECKDSDXADLVLAKRQTQRGKHXVLQIANYFYEERLTWHSCPENETQKLLHCSILXYSVCVCKT

SEQ ID NO: 2765 - protein, 140 aa, Homo sapiens
  MISC_FEATURE (1): Xaa equals any of the twenty naturally occurring L-amino acids
  MISC_FEATURE (131): Xaa equals any of the twenty naturally occurring L-amino acids
  MISC_FEATURE (137): Xaa equals any of the twenty naturally occurring L-amino acids
XKQEEKSALLDHIWVTRWLDDIGLPQYKDQFHESRVDGRMLQYLTVNDLLFLKVTSQLHHLSIKCAIHVLHVNKFNPHCLHRRPADESNLSPSEVVQWSNHRVMEWLRSVDLAEYAPNLRGSGVHGGLICXWALWPXPPA

SEQ ID NO: 2766 - protein, 268 aa, Homo sapiens
  MISC_FEATURE (264): Xaa equals any of the twenty naturally occurring L-amino acids
GCASSVARPSSLFRSAWSCEWSVRCARACTMSVPAFIDISEEDQAAELRAYLKSKGAEISEENSEGGLHVDLAQIIEACDVCLKEDDKDVESVMNSVVSLLLILEPDKQEALIESLCEKLVKFREGERPSLRLQLLSNLFHGMDKNTPVRYTVYCSLIKVAASCGAIQYIPTELDQVRKWISDWNLTTEKKHTLLRLLYEALVDCKKSDAASKVMVELLGSYTEDNASQARVDAHRCIVRALKDPNAFLFDHLLTLKPVKFLEXELIP

SEQ ID NO: 2767 - protein, 106 aa, Homo sapiens
NLSKMAAPWASLRLVAPMWNGRIRGIHRLGAAVAPEGNQKKKRTILQFLTNYFYDVEALRDYLLQREMYKVHEKNRSYTWLEKQHGPYGAGAFFILKQGGAVKYDR

SEQ ID NO: 2768 - protein, 451 aa, Homo sapiens
RSQLLALACLPAPLLARAFARPLLEDRGDSDHSLWLGRETEAAAAQGKRGCSGGSRKMSGEDEQQEQTIAEDLVVTKYKMGGDIANRVLRSLVEASSSGVSVLSLCEKGDAMIMEETGKIFKKEKEMKKGIAFPTSISVNNCVCHFSPLKSDQDYILKEGDLVKIDLGVHVDGFIANVAHTFVVDVAQGTQVTGRKADVIKAAHLCAEAALRLVKPGNQNTQVTEAWNKVAHSFNCTPIEGMLSHQLKQHVIDGEKTIIQNPTDQQKKDHEKAEFEVHEVYAVDVLVSSGEGKAKDAGQRTTIYKRDPSKQYGLKMKTSRAFFSEVERRFDAMPFTLRAFEDEKKARMGVVECAKHELLQPFNVLYEKEGEFVAQFKFTVLLMPNGPMRITSGPFEPDLYKSEMEVQDAELKALLQSSASRKTQKKKKKKASKTAENATSGETLEENEAGD

SEQ ID NO: 2769 - protein, 359 aa, Homo sapiens
VDSILAIKKQDEPIDLFMIEIMEMKHKSETDTSLIRGLVLDHGARHPDMKKRVEDAYILTCNVSLEYEKTEVNSGFFYKSAEEREKLVKAERKFIEDRVKKIIELKRKVCGDSDKGFVVINQKGIDPFSLDALSKEGIVALRRAKRRNMERLTLACGGVALNSFDDLSPDCLGHAGLVYEYTLGEEKFTFIEKCNNPRSVTLLIKGPNKHTLTQIKDAVRDGLRAVKNAIDDGCVVPGAGAVEVAMAEALIKHKPSVKGRAQLGVQAFADALLIIPKVLAQNSGFDLQETLVKIQAEHSESGQLVGVDLNTGEPMVAAEVGVWDNYCVKKQLLHSCTVIATNILLVDEIMRAGMSSLKG

SEQ ID NO: 2770 - protein, 120 aa, Homo sapiens
ALRMVQRLTYRRRLSYNTASNKTRLSRTPGNRIVYLYTKKVGKAPKSACGVCPGRLRGVRAVRPKVLMRLSKTKKHVSRAYGGSMCAKCVRDRIKRAFLIEEQKIVVKVLKAQAQSQKAK

SEQ ID NO: 2771 - protein, 123 aa, Homo sapiens
CLQALRMVQRLTYRRRLSYNTASNKTRLSRTPGNRIVYLYTKKVGKAPKSACGVCPGRLRGVRAVRPKVLMRLSKTKKHVSRAYGGSMCAKCVRDRIKRAFLIEEQKIVVKVLKAQAQSQKAK

SEQ ID NO: 2772 - protein, 264 aa, Homo sapiens
SGAMVVVAAAPNPADGTPKVLLLSGQPASAAGAPAGQALPLMVPAQRGASPEAASGGLPQARKRQRLTHLSPEEKALRRKLKNRVAAQTARDRKKARMSELEQQVVDLEEENQKLLLENQLLREKTHGLVVENQELRQRLGMDALVAEEEAEAKGNEVRPVAGSAESAALRLRAPLQQVQAQLSPLQNISPWILAVLTLQIQSLISCWAFWTTWTQSCSSNALPQSLPAWRSSQRSTQKDPVPYQPPFLCQWGRHQPSWKPLMN

SEQ ID NO: 2773 - protein, 326 aa, Homo sapiens
RVYSQQCQYLVEDIQHILERLHRAQLQIRIDMETELPSLLLPNHLAMMETLEDAPDPFFGMMSVDPRLPSPFDIPQIRHLLEAAIPERVEEIPPEVPTEPREPERIPVTVLPPEAITILEAEPIRMLEIEGERELPEVSRRELDLLIAEEEEAILLEIPRLPPPAPAEVEGIGEALGPEELRLTGWEPGALLMEVTPPEELRLPAPPSPERRPPVPPPPRRRRRRRLLFWDKETQISPEKFQEQLQTRAHCWECPMVQPPERTIRGPAELFRTPTLSGWLPPELLGLWTHCAQPPPKALRRELPEEAAAEEERRKIEVPSEIERSP

SEQ ID NO: 2774 - protein, 261 aa, Homo sapiens
RNPRSAQGFPLPISLTSPFKPKLEPTVHRPSIALAMALSDADVQKQIKHMMAFIEQEANEKAEEIDAKAEEEFNIEKGRLVQTQRLKIMEYYEKKEKQIEQQKKIQMSNLMNQARLKVLRARDDLITDLLNEAKQRLSKVVKDTTRYQVLLDGLVLQGLYQLLEPRMIVRCRKQDFPLVKAAVQKAIPMYKIATKNDVDVQIDQESYLPEDIAGGVEIYNGDRKIKVSNTLESRLDLIAQQMMPEVRGALFGANANRKFLD

SEQ ID NO: 2775 - protein, 99 aa, Homo sapiens
  MISC_FEATURE (14): Xaa equals any of the twenty naturally occurring L-amino acids
CGGCLRPHVVWFGXNLDPAILEEVDRELAHCDLCLVVGTSSVVYPAAMFAPQVAARGVPVAEFNTETTPATNRFRFHFQGPCGTTLPEALACHENETVS

SEQ ID NO: 2776 - protein, 166 aa, Homo sapiens
  MISC_FEATURE (36): Xaa equals any of the twenty naturally occurring L-amino acids
  MISC_FEATURE (54): Xaa equals any of the twenty naturally occurring L-amino acids
CNSRSQGLALTQVASRIPVGKRPATSGLELACVPPXPAPPTSRVQCWARAAQEXRTRRLARHQTHPTQRRGPQARPVVPSRWHCSSPLLQVQRPHRNTRACAPEPSFRPFLHVPTWDAECSGARTPSTAWTSAAVKLREACLSGPGSGSHQLLLLTPRSKRRTGGG

SEQ ID NO: 2777 - protein, 130 aa, Homo sapiens
  MISC_FEATURE (120): Xaa equals any of the twenty naturally occurring L-amino acids
  MISC_FEATURE (129): Xaa equals any of the twenty naturally occurring L-amino acids
PPPPPPPPGPPPPPGLPSDGDHQVPTTAGNKAALLDQIREGAQLKKVEQNSRPVSCSGRDALLDQIRQGIQLKSVADGQESTPPTPAPTSGIVGALMEVMHKRSKAIHSSDEDEDEDDEXDFEDDDEWXD

SEQ ID NO: 2778 - protein, 336 aa, Homo sapiens
QAGRRLRYLPTGSFPFLLLLLLLCIQLGGGQKKKENLLAEKVEQLMEWSSRRSIFRMNGDKFRKFIKAPPRNYSMIVMFTALQPQRQCSVCRQANEEYQILANSWRYSSAFCNKLFFSMVDYDEGTDVFQQLNMNSAPTFMHFPPKGRPKRADTFDLQRIGFAAEQLAKWIADRTDVHIRVFRPPNYSGTIALALLVSLVGGLLYLRRNNLEFIYNKTGWAMVSLCIVFAMTSGQMWNHIRGPPYAHKNPHNGQVSYIHGSSQAQFVAESHIILVLNAAITMGMVLLNEAATSKGDVGKRRIICLVGLGLVVFFFSFLLSIFRSKYHGYPYSFLIK

SEQ ID NO: 2779 - protein, 373 aa, Homo sapiens
  MISC_FEATURE (356): Xaa equals any of the twenty naturally occurring L-amino acids
  MISC_FEATURE (363): Xaa equals any of the twenty naturally occurring L-amino acids
IRHRSTAQSPRPGRGRSQAAMAYHSFLVEPISCHAWNKDRTQIAICPNNHEVHIYEKSGAKWTKVHELKEHNGQVTGIDWAPESNRIVTCGTDRNAYVWTLKGRTWKPTLVILRINRAARCVRWAPNENKFAVGSGSRVISICYFEQENDWWVCKHIKKPIRSTVLSLDWHPNNVLLAAGSCDFKCRIFSAYIKEVEERPAPTPWGSKMPFGELMFESSSSCGWVHGVCFSASGSRVAWVSHDSTVCLADADKKMAVATLASETLPLLALTFITDNSLVAAGHDCFPVLFTYDAAAGMLSFGGRLDVPKQSSQRGLTARERFQNLDKKATPKGGTASGAGLNFAAQEQRQPDLGAXRPAGPMXAILNTGWMAA

SEQ ID NO: 2780 - protein, 120 aa, Homo sapiens
AGTHLRPFSPSLSAAMALRYPMAVGLNKGHKVTKNVSKPRHSRRRGRLTKHTKFVRDMIREVCGFAPYERRAMELLKVSKDKRALKFIKKRVGTHIRAKRKREELSNVLAAMRKAAAKKD

SEQ ID NO: 2781 - protein, 312 aa, Homo sapiens
EDSEMAPPAPGPASGGSGEVDELFDVKNAFYIGSYQQCINEAQRVKLSSPERDVERDVFLYRAYLAQRKFGVVLDEIKPSSAPELQAVRMFADYLAHESRRDSIVAELDREMSRSVDVTNTTFLLMAASIYLHDQNPDAALRALHQGDSLECTAMTVQILLKLDRLDLARKELKRMQDLDEDATLTQLATAWVSLATGGEKLQDAYYIFQEMADKCSPTLLLLNGQAACHMAQGRWEAAEGLLQEALDKDSGYPETLVNLIVLSQHLGKPPEVTNRYLSQLKDAHRSHPFIKEYQAKENDFDRLVLQYAPSA

SEQ ID NO: 2782 - protein, 135 aa, Homo sapiens
DLLAEAKDLFTKAVKHFGEEAGKIQPDEFFGIFDQFLQAVSEAKQENENMRKKKEEEERRARMEAQLKEQRERERKMRKAKENSEESGEFDDLVSALRSGEVFDKDLSKLKRNRKRITNQMTDSSRERPITKLNF

SEQ ID NO: 2783 - protein, 386 aa, Homo sapiens
  MISC_FEATURE (18): Xaa equals any of the twenty naturally occurring L-amino acids
  MISC_FEATURE (78): Xaa equals any of the twenty naturally occurring L-amino acids
  MISC_FEATURE (196): Xaa equals any of the twenty naturally occurring L-amino acids
  MISC_FEATURE (332): Xaa equals any of the twenty naturally occurring L-amino acids
APEGRGSSSGVYLANKDXEGQDVVEAILAHLNTVPRTRKQIIHHLVQMGLADSVKDFQRKGTHIVLWTGDQELELQRXFEEFRDSDDVLGHIMKNITAKRSRARIVDKLLALGLVAERRELYKKRQKKLASSILPNGAESLKDFCQEDLEEEENLPEEDSEEEEEGGSEAEQVQGSLVLSNENLGQSLHQEGFSIXLLWLQNCLIRAADDREEDGCSQAVPLVPLTEENEEAMENEQFQQLLRKLGVRPPASGQETFWRIPAKLSPTQLRRAAASLSQPEEEQKLQPELQPKVPGEQGSDEEHCKEHRAQALRALLLAHKKKAGLASPEEEXAVGKEPLKAAPKKRQLLDSDEEQEEDEGRNRAPELGAPGIQKKKRYQIEDDEDD

SEQ ID NO: 2784 - protein, 33 aa, Homo sapiens
KIKKIARHGHGSAYLWSQPLKRLRQDDCLSPGG

SEQ ID NO: 2785 - protein, 157 aa, Homo sapiens
  MISC_FEATURE (40): Xaa equals any of the twenty naturally occurring L-amino acids
SWCLSRAVVGDSMTSEVIEDEKQFYSKAKTYWKQIPPTVXGMLGGYGHISSIDINSSRKFLQRFLREGPNKTGTSCALDCGAGIGRITKRLLLPLFREVDMVDITEDFLVQAKTYLGEEGKRATSPISTWPSSCGAARAASAPTASSSSKTTWPRRA

SEQ ID NO: 2786 - protein, 233 aa, Homo sapiens
HERLLHSYFYLRHWHLNQMSQEFLQQSLKEGEAALHYFEELPSANGSVPIVWQATPRPWLVITIITVDRQPGFHYVLQVVSQFHRLLQQCGPQCEGHQLFLCNVERSVSHFDAKLLSKYVPVANRYEGTEDDYGDDPSTNSFEKEKQDYVYCLESSLQTYNPDYVLMVEDDAVPEEQIFPVLEHLLRARFSEPHLRDALYLKLYHPERLQHYINPEPMRILEWVGVGMLLGPY

SEQ ID NO: 2787 - protein, 53 aa, Homo sapiens
GRVIIIMWGPFCPFLFLFSRLSNSLTKDSMNIKAHIHMLLEVRAAHPTTRLCV

SEQ ID NO: 2788 - protein, 416 aa, Homo sapiens
SPSERLQRGREEQPAGGGGESVSSWEEQNRGGAPAGAGGGPTMAIRKKSTKSPPVLSHEFVLQNHADIVSCVAMVFLLGLMFEITAKASIIFVTLQYNVTLPATEEQATESVSLYYYGIKDLATVFFYMLVAIIIHAVIQEYMLDKINRRMHFSKTKHSKFNESGQLSAFYLFACVWGTFILISENYISDPTILWRAYPHNLMTFQMKFFYISQLAYWLHAFPELYFQKTKKEDIPRQLVYIGLYLFHIAGAYLLNLNHLGLVLLVLHYFVEFLFHISRLFYFSNEKYQKGFSLWAVLFVLGRLLTLILSVLTVGFGLARAENQKLDFSTGNFNVLAVRIAVLASICVTQAFMMWKFINFQLRRWREHSAFQAPAVKKKPTVTKGRSSKKGTENGVNGTLTSNVADSPRNKKEKSS

SEQ ID NO: 2789 - protein, 466 aa, Homo sapiens
VSPRAGGAGNNRGRAHRASSCSLPAPPATLDPRIPPARLPAMADKEAAFDDAVEERVINEEYKIWKKNTPFLYDLVMTHALEWPSLTAQWLPDVTRPEGKDFSIHRLVLGTHTSDEQNHLVIASVQLPNDDAQFDASHYDSEKGEFGGFGSVSGKIEIEIKINHEGEVNRARYMPQNPCIIATKTPSSDVLVFDYTKHPSKPDPSGECNPDLRLRGHQKEGYGLSWNPNLSGHLLSASDDHTICLWDISAVPKEGKVVDAKTIFTGHTAVVEDVSWHLLHESLFGSVADDQKLMIWDTRSNNTSKPSHSVDAHTAEVNCLSFNPYSEFILATGSADKTVALWDLRNLKLKLHSFESHKDEIFQVQWSPHNETILASSGTDRRLNVWDLSKIGEEQSPEDAEDGPPELLFIHGGHTAKISDFSWNPNEPWVICSVSEDNIMQVWQMAENIYNDEDPEGSVDPEGQGS

SEQ ID NO: 2790 - protein, 100 aa, Homo sapiens
CDPFFPMFSDLESRREVKKEEGEAFAREHGLIFMETSAKTASNVEEAFINTAKEIYEKIQEGVFDINNEANGIKIGPQHAATNATHAGNQGGQQAGGGCC

SEQ ID NO: 2791 - protein, 512 aa, Homo sapiens
  MISC_FEATURE (11): Xaa equals any of the twenty naturally occurring L-amino acids
  MISC_FEATURE (15): Xaa equals any of the twenty naturally occurring L-amino acids
  MISC_FEATURE (21): Xaa equals any of the twenty naturally occurring L-amino acids
  MISC_FEATURE (85): Xaa equals any of the twenty naturally occurring L-amino acids
  MISC_FEATURE (507): Xaa equals any of the twenty naturally occurring L-amino acids
DAGHAAGDAGXHDHXYRIRTXAFMAVCIETAKRYSLDDYRTPVFIFERLCSIIYPEENEVTEFFVTLEKDPQQEDFLQGRMLGNXYSSNEPGIGPLMRDIKNKICQDCDLVALLEDDSGMELLVNNKIISLDLPVAEVYKKVWCTTNEGEPMRIVYRMRGLLGDATEEFIESLDSTTDEEEDEEEVYKMAGVMAQCGGLECMLNRLAGIRDFKQGRHLLTVLLKLFSYCVKVKVNRQQLVKLEMNTLNVMLGTLNLALVAEQESKDSGGAAVAEQVLSIMEIILDESNAEPLSEDKGNLLLTGDKDQLVMLLDQINSTFVRSNPSVLQGLLRIIPYLSFGEVEKMQILVERFKPYCNFDKYDEDHSGDDKVFLDCFCKIAAGIKNNSNGHQLKDLILQKGITQNALDYMKKHIPSAKNLDADIWKKFLSRPALPFILRLLRGLAIQHPGTQVLIGTDSIPNLHKLEQVSSDEGIGTLAENLLEALREHPDVNKKIDAARRRPGQRRXAWPWQ

SEQ ID NO: 2792 - protein, 274 aa, Homo sapiens
DPRVRAVSAFAMRPGAPGPLWPLPWGALAWAVGFVSSMGSGNPAPGGVCWLQQGQEATCSLVLQTDVTRAECCASGNIDTAWSNLTHPGNKINLLGFLGLVHCLPCKDSCDGVECGPGKACRMLGGRPRCECAPDCSGLPARLQVCGSDGATYRDECELRAARCRGHPDLSVMYRGRCRKSCEHVVCPRPQSCVVDQTGSAHCVVCRAAPCPVPSSPGQELCGNNNVTYISSCHMRQATCFLGRSIGVRHAGSCAGTPEEPPGGESAEEEENFV

SEQ ID NO: 2793 - protein, 209 aa, Homo sapiens
  MISC_FEATURE (19): Xaa equals any of the twenty naturally occurring L-amino acids
  MISC_FEATURE (21): Xaa equals any of the twenty naturally occurring L-amino acids
  MISC_FEATURE (153): Xaa equals any of the twenty naturally occurring L-amino acids
SDVSVVNMCEIMNHMTALXSXWFFIGVHLYPFMINKLVYIVITVIIFSKMFLKIIIVITSVIAQRELGIDFIQLTLYVIRVFFISSSVGSSASSSATRRESLSTSSDLYKRSSSSLAPIGQPFYNSLGFSSSPSPIGMPLPSQTPGHSLTPPXSLSSHGSSSSLHLGKKKPKPFLFVCIHVCVFVCVFIIYVKYLMLVKTCQIAFAFRY

SEQ ID NO: 2794 - protein, 137 aa, Homo sapiens
  MISC_FEATURE (10): Xaa equals any of the twenty naturally occurring L-amino acids
DRILKDFFPXRCRDLVHRQTASAVVQHMSLGVYGFGCEDSLNHLLNYVWPNVFETSPHVIQAVMGALEGLRVAIGPCRMLQYCLQGLFHPARKVRDVYWKIYNSIYIGSQDALIAHYPRIYNDDKNTYIRYELDYIL

SEQ ID NO: 2795 - protein, 294 aa, Homo sapiens
YLRGSQRPAMDHLESFIAECDRRTELAKKRLAETQEEISAEVSAKAEKVHELNEEIGKLLAKAEQLGAEGNVDESQKILMEVEKVRAKKKEAEEEYRNSMPASSFQQQKLRVCEVCSAYLGLHDNDRRLADHFGGKLHLGFIQIREKLDQLRKTVAEKQEKRNQDRLRRREEREREERLSRRSGSRTRDRRRSRSRDRRRRRSRSTSRERRKLSRSRSRDRHRRHRSRSRSHSRGHRRASRDRSAKYKFSRERASREESWESGRSERGPPDWRLESSNGKMASRRSEEKEAGEI

SEQ ID NO: 2796 - protein, 208 aa, Homo sapiens
AAAGAVAVFLILRIWVVLRSMDVTPRESLSILVVAGSGGHTTEILRLLGSLSNAYSPRHYVIADTDEMSANKINSFELDRADRDPSNMYTKYYIHRIPRSREVQQSWPSTVFTTLHSMWLSFPLIHRVKPDLVLCNGPGTCVPICVSALLLGILGIKKVIIVYVESICRVETLSMSGKILFHLSDYFIVQWPALKEKYPKSVYLGRIV

SEQ ID NO: 2797 - protein, 72 aa, Homo sapiens
  MISC_FEATURE (22): Xaa equals any of the twenty naturally occurring L-amino acids
FPGRPTRPLQHLLLRLLGIRRXSGKPSEKNLYADIDAAWQALRTRYGVSPENIILYGQSIGTDPHGRLGLEV

SEQ ID NO: 2798 - protein, 30 aa, Homo sapiens
VWWHVPVVPLSWETEAGGSLSPGGQGCSQL

SEQ ID NO: 2799 - protein, 521 aa, Homo sapiens
  MISC_FEATURE (84): Xaa equals any of the twenty naturally occurring L-amino acids
  MISC_FEATURE (93): Xaa equals any of the twenty naturally occurring L-amino acids
  MISC_FEATURE (94): Xaa equals any of the twenty naturally occurring L-amino acids
ADYLLSRMDVTSCISYRNFASCMGDSRLLNKVDAYIQEHLLQISEEEEFLKLPRLKLEVMLEDNVCLPSNGKLYTKVINWVQRXIWENGDSLXXLMEEVQTLYYSADHKLLDGNLLDGQAEVFGSDDDHIQFVQKKPPRENGHKQISSSSTGCLSSPNATVQSPKHEWKIVASEKTSNNTYLCLAVLDGIFCVIFLHGRNSPQSSPTSTPKLSKSLSFEMQQDELIEKPMSPMQYARSGLGTAEMNGKLIAAGGYNREECLRTVECYNPHTDHWSFLAPMRTPRARFQMAVLMGQLYVVGGSNGHSDDLSCGEMYDSNIDDWIPVPELRTNRCNAGVCALNGKLYIVGGSDPYGQKGLKNCDVFDPVTKLWTSCAPLNIRRHQSAVCELGGYLYIIGGAESWNCLNTVERYNPENNTWTLIAPMNVARRGAGVAVLNGKLFVCGGFDGSHAISCVEMYDPTRNEWKMMGNMTSPRSNAGIATVGNTIYAVGGFDGNEFLNTVEVYNLESNEWSPYTKIFQF

SEQ ID NO: 2800 - protein, 45 aa, Homo sapiens
SERIIQGWTGQAAMLARWWAKSLVKGGLRRRVLVSVSYAMEVSHQ

SEQ ID NO: 2801 - protein, 349 aa, Homo sapiens
PRPSSEKLSQSVIDGVTVLGGQFHDYGLLTTPQLHYMVYCRNTGGRYGKATIEGYYQKLSKAFVELTKQGMEIKSNERCCSFDGDADRIVYYYHDADGHFHLIDGDKIATLISSFLKELLVEIGESLNIGVVQTAYANGSSTRYLEEVMKVPVYCTKTGVKHLHHKAQEFDIGVYFEANGHGTALFSTAVEMKIKQSAEQLEDKKRKAAKMLENIIDLFNQAAGDAISDMLVIEAILALKGLTVQQWDALYTDLPNRQLKVQVADRRVISTTDAERQAVTPPGLQEAINDLVKKYKLSRAFVRPSGTEDVVRVYAEADSQESADHLAHEVSLAVFQLAGGIGERPQPGF

SEQ ID NO: 2802 - protein, 131 aa, Homo sapiens
APPGHSTMPACRLGPLAAALLLSLLLFGFTLVSGTGAEKTGVCPELQADQNCTQECVSDSECADNLKCCSAGCATFCSLPNDKEGSCPQVNINFPQLGLCRDQCQVDSQCPGQMKCCRNGCGKVSCVTPNF

SEQ ID NO: 2803 - protein, 137 aa, Homo sapiens
ASAHTCTPPGHSTMPACRLGPLAAALLLSLLLFGFTLVSGTGAEKTGVCPELQADQNCTQECVSDSECADNLKCCSAGCATFCSLPNDKEGSCPQVNINFPQLGLCRDQCQVDSQCPGQMKCCRNGCGKVSCVTPNF

SEQ ID NO: 2804 - protein, 85 aa, Homo sapiens
  MISC_FEATURE (7): Xaa equals any of the twenty naturally occurring L-amino acids
  MISC_FEATURE (85): Xaa equals any of the twenty naturally occurring L-amino acids
SLMLNLXKKFVSYRADPLSNMVLTFSTKEDAVSFAEKNGWSYDIEERKVPKPKSKSYGANFSWNKRTRVPPNRLGTELYLCLTVX

SEQ ID NO: 2805 - protein, 337 aa, Homo sapiens
  MISC_FEATURE (9): Xaa equals any of the twenty naturally occurring L-amino acids
  MISC_FEATURE (224): Xaa equals any of the twenty naturally occurring L-amino acids
AFAKSYLGXTIEGTPAGTGPEFPGRPTRPPTRPPTRPRTRGLGPNIKSIVTMLMLMLLMMFAVHCTWVTSNAYSSPSVVLASYNHDGTRNILDDFREAYFWLRQNTDEHARVMSWWDYGYQIAGMANRTTLVDNNTWNNSHIALVGKAMSSNETAAYKIMRTLDVDYVLVIFGGVIGYSGDDINKFLWMVRIAEGEHPKDIRESDYFTPQGEFRVDKAGSPTLXNCLMYKMSYYRFGEMQLDFRTPPGFDRTRNAEIGNKDIKFKHLEEAFTSEHWLVRIYKVKAPDNRETLDHKPRVTNIFPKQKYLSKKTTKRKRGYIKNKLVFKKGKKISKKTV

SEQ ID NO: 2806 - protein, 222 aa, Homo sapiens
AAECGCIAAGFGAYPVAAKARAGGGPTLQCPPPSSPEKAASLEYDYETIRNIDCYSTDFCVRVRDGMRYWNMTVQWWLAQYIYKSAPARSYVLRSAWTMLLSAYWHGLHPGYYLSFLTIPLCLAAEGRLESALRGRLSPGGQKAWDWVHWFLKMRAYDYMCMGFVLLSLADTLRYWASIYFCIHFLALAALGLGLALGGGSPSRRKAASQPTSLAPEKLREE

SEQ ID NO: 2807 - protein, 379 aa, Homo sapiens
GPFCGSLQKTSADTKGKQEQAKEEKARELFLKAVEEEQNGALYEAIKFYRRAMQLVPDIEFKITYTRSPDGDGVGNSYIEDNDDDSKMADLLSYFQQQLTFQESVLKLCQPELESSQIHISVLPMEVLMYIFRWVVSSDLDLRSLEQLSLVCRGFYICARDPEIWRLACLKVWGRSCIKLVPYTSWREMFLERPRVRFDGVYISKTTYIRQGEQSLDGFYRAWHQVEYYRYIRFFPDGHVMMLTTPEEPQSIVPRLRTRNTRTDAILLGHYRLSQDTDNQTKVFAVITKKKEEKPLDYKYRYFRRVPVQEADQSFHVGLQLCSSGHQRFNKLIWIHHSCHITYKSTGETAVSAFEIDKMYTPLFFARVRSYTAFSERPL

SEQ ID NO: 2808 - protein, 154 aa, Homo sapiens
  MISC_FEATURE (109): Xaa equals any of the twenty naturally occurring L-amino acids
DRKEEGDPIGIWAPEGKSCTPKPPPPSLPRTSPGWKRALQKGDTGCPGPSTASTPHPLILGPSQAPPKPKPPQVLGSQPVPPASCPPSPEHSHTEKEQARAPGGQDGAXHTVGGGGAAGRREGQNKTFSFGFFFSFFFLPFTLWVVLLFLSFSL

SEQ ID NO: 2809 - protein, 691 aa, Homo sapiens
  MISC_FEATURE (3): Xaa equals any of the twenty naturally occurring L-amino acids
EPXLESLIADKSGSKKTLRSSLEGPTILDIEKFHRESFFYTHLINFSESLQQCCDLSQLWFREFFLELTMGRRIQFPIEMSMPWILTDHILETKEASMMEYVLYSLDLYNDSAHYALTRFNKQFLYDEIEAEVNLCFDQFVYKLADQIFAYYKVMAGSLLLDKRLRSECKNQGATIHLPPSNRYETLLKQRHVQLLGRSIDLNRLITQRVSAAMYKSLELAIGRFESEDLTSIVELDGLLEINRMTHKLLSRYLTLDGFDAMFREANHNVSAPYGRITLHVFWELNYDFLPNYCYNGSTNRFVRTVLPFSQEFQRDKQPNAQPQYLHGSKALNLAYSSIYGSYRNFVGPPHFQVICRLLGYQGIAVVMEELLKVVKSLLQGTILQYVKTLMEVMPKICRLPRHEYGSPGILEFFHHQLKDIVEYAELKTVCFQNLREVGNAILFCLLIEQSLSLEEVCDLLHAAPFQNILPRVHVKEGERLDAKMKRLESKYAPLHLVPLIERLGTPQQIAIAREGDLLTKERLCCGLSMFEVILTRIRSFLDDPIWRGPLPSNGVMHVDECVEFHRLWSAMQFVYCIPVGTHEFTVEQCFGDGLHWAGCMIIVLLGQQRRFAVLDFCYHLLKVQKHDGKDEIIKNVPLKKMVERIRKFQILNDEIITILDKYLKSGDGEGTPVEHVRCFQPPIHQSLASS

SEQ ID NO: 2810 - protein, 85 aa, Homo sapiens
  MISC_FEATURE (26): Xaa equals any of the twenty naturally occurring L-amino acids
  MISC_FEATURE (27): Xaa equals any of the twenty naturally occurring L-amino acids
  MISC_FEATURE (29): Xaa equals any of the twenty naturally occurring L-amino acids
  MISC_FEATURE (32): Xaa equals any of the twenty naturally occurring L-amino acids
  MISC_FEATURE (47): Xaa equals any of the twenty naturally occurring L-amino acids
KEKLMSAPALRLPDLTKLFTLYVSEXXKXAVXVLTQTVGPWPRPVAXLSKQLDEVSKRWPPCPKSLVAIALLAQEADKKSKTYLW

SEQ ID NO: 2811 - protein, 53 aa, Homo sapiens
  MISC_FEATURE (30): Xaa equals any of the twenty naturally occurring L-amino acids
KCFREQKEQLQKMKDFGSEPQMADHLPPQXSRLQNTSSRPGNVSGMGECVLRK

SEQ ID NO: 2812 - protein, 757 aa, Homo sapiens
  MISC_FEATURE (223): Xaa equals any of the twenty naturally occurring L-amino acids
CRNSARGAGEAAEDGVKMAAFSEMGVMPEIAQAVEEMDWLLPTDIQAESIPLILGGGDVLMAAETGSGKTGAFSIPVIQIVYETLKDQQEGKKGKTTIKTGASVLNKWQMNPYDRGSAFAIGSDGLCCQSREVKEWHGCRATKGLMKGKHYYEVSCHDQGLCRVGWSTMQASLDLGTDKFGFGFGGTGKKSHNKQFDNYGEEFTMHDTIGCYLDIDKGHVKFXKNGKDLGLAFEIPPHMKNQALFPACVLKNAELKFNFGEEEFKFPPKDGFVALSKAPDGYIVKSQHSGNAQVTQTKFLPNAPKALIVEPSRELAEQTLNNIKQFKKYIDNPKLRELLIIGGVAARDQLSVLENGVDIVVGTPGRLDDLVSTGKLNLSQVRFLVLDEADGLLSQGYSDFINRMHNQIPQVTSDGKRLQVIVCSATLHSFDVKKLSEKIMHFPTWVDLKGEDSVPDTVHHVVVPVNPKTDRLWERLGKSHIRTDDVHAKDNTRPGANSPEMWSEAIKILKGEYAVRAIKEHKMDQAIIFCRTKIDCDNLEQYFIQQGGGPDKKGHQFSCVCLHGDRKPHERKQNLERFKKGDVRFLICTDVAARGIDIHGVPYVINVTLPDEKQNYVHRIGRVGRAERMGLAISLVATEKEKVWYHVCSSRGKGCYNTRLKEDGGCTIWYNEMQLLSEIEEHLNCTISQVEPDIKVPVDEFDGKVTYGQKRAAGGGSYKGHVDILAPTVQELAALEKEAQTSFLHLGYLPNQLFRTF

SEQ ID NO: 2813 - protein, 116 aa, Homo sapiens
  MISC_FEATURE (18): Xaa equals any of the twenty naturally occurring L-amino acids
  MISC_FEATURE (46): Xaa equals any of the twenty naturally occurring L-amino acids
  MISC_FEATURE (88): Xaa equals any of the twenty naturally occurring L-amino acids
  MISC_FEATURE (98): Xaa equals any of the twenty naturally occurring L-amino acids
  MISC_FEATURE (112): Xaa equals any of the twenty naturally occurring L-amino acids
RKREGGRLRFVAAARPLXGRAEPRPSRSPATPRSRYPRAATAAGRXEARAMASGADSKGDDLSTAILKQKNRPNRLLLMKPSMRTTVXCLCSQPKMDXLQCFRSEQGGAEKXEEEG

SEQ ID NO: 2814 - protein, 822 aa, Homo sapiens
PLPAGRHSRRPGEARAMASGADSKGDDLSTAILKQKNRPNRLIVDEAINEDNSVVSLSQPKMDELQLFRGDTVLLKGKKRREAVCIVLSDDTCSDEKIRMNRVVRNNLRVRLGDVISIQPCPDVKYGKRIHVLPIDDTVEGITGNLFEVYLKPYFLEAYRPIRKGDIFLVRGGMRAVEFKVVETDPSPYCIVAPDTVIHCEGEPIKREDEEESLNEVGYDDIGGCRKQLAQIKEMVELPLRHPALFKAIGVKPPRGILLYGPPGTGKTLIARAVANETGAFFFLINGPEIMSKLAGESESNLRKAFEEAEKNAPAIIFIDELDAIAPKREKTHGEVERRIVSQLLTLMDGLKQRAHVIVMAATNRPNSIDPALRRFGRFDREVDIGIPDATGRLEILQIHTKNMKLADDVDLEQVANETHGHVGADLAALCSEAALQAIRKKMDLIDLEDETIDAEVMNSLAVTMDDFRWALSQSNPSALRETVVEVPQVTWEDIGGLEDVKRELQELVQYPVEHPDKFLKFGMTPSKGVLFYGPPGCGKTLLAKAIANECQANFISIKGPELLTMWFGESEANVREIFDKARQAAPCVLFFDELDSIAKARGGNIGDGGGAADRVINQILTEMDGMSTKKNVFIIGATNRPDIIDPAILRPGRLDQLIYIPLPDEKSRVAILKANLRKSPVAKDVDLEFLAKMTNGFSGADLTEICQRACKLAIRESIESEIRRERERQTNPSAMEVEEDDPVPEIRRDHFEEAMRFARRSVSDNDIRKYEMFAQTLQQSRGFGSFRFPSGNQGGAGPSQGSGGGTGGSVYTEDNDDDLYG

SEQ ID NO: 2815 - protein, 364 aa, Homo sapiens
  MISC_FEATURE (84): Xaa equals any of the twenty naturally occurring L-amino acids
GPTRRRKMAAAEVADTQLMLGVGLIEKDTNGEVLWVWCYPSTTATLRNLLLRKCCLTDENKLLHPFVFGQYRRTWFYITTIEVXDSSILKKVTHFSIVLTAKDFNPEKYAAFTRILCRMYLKHGSPVKMMESYIAVLTKGICQSEENGSFLSKDFDARKAYLAGSIKDIVSQFGMETVILHTALMLKKRIVVYHPKIEAVQEFTRTLPALVWHRQDWTILHSYVHLNADELEALQMCTGYVAGFVDLEVSNRPDLYDVFVNLAESEITIAPLAKEAMAMGKLHKEMGQLIVQSAEDPEKSESHVIQDIALKTREIFTNLAPFSEVSADGEKRVLNLEALKQKRFPPATENFLYHLAAAEQMLKI

SEQ ID NO: 2816 - protein, 583 aa, Homo sapiens
  MISC_FEATURE (350): Xaa equals any of the twenty naturally occurring L-amino acids
  MISC_FEATURE (446): Xaa equals any of the twenty naturally occurring L-amino acids
GKMAVAGAVSGEPLVHWCTQQLRKTFGLDVSEEIIQYVLSIESAEEIREYVTDLLQGNEGKKGQFIEELITKWQKNDQELISDPLQQCFKKDEILDGQKSGDHLKRGRKKGRNRQEVPAFTEPDTTAEVKTPFDLAKAQENSNSVKKKTKFVNLYTREGQDRLAVLLPGRHPCDCLGQKHKLINNCLICGRIVCEQEGSGPCLFCGTLVCTHEEQDILQRDSNKSQKLLKKLMSGVENSGKVDISTKDLLPHQELRIKSGLEKAIKHKDKLLEFDRTSIRRTQVIDDESDYFASDSNQWLSKLERETLQKREEELRELRHASRLSKKVTIDFAGRKILEEENSLAEYHSXLDETIQAIANGTLNQPLTKLDRSSEEPLGVLVNPNMYQSPPQWVDHTGAASQKKAFRSSGFGLEFNSFQHQLRIQDQEFQEGFDGGWCLSVHQPWXSLLVRGIKRVEGRSWYTPHRGRLWIAATAKKPSPQEVSELQATYRLLRGKDVEFPNDYPSGCLLGCVDLIDCLSQKQFKEQFPDISQESDSPFVFICKNPQEMVVKFPIKGNPKIWKLDSKIHQGAKKGLMKQNKAV

SEQ ID NO: 2817 - protein, 92 aa, Homo sapiens
SLSCLSPSSQVPFGEVSMVRDWLGIVGPVLTPPQEHPKRPVLGLECPQSEGPRQSMGHEIKSELLMGGCSWIRGKIQCDRVQVRRPGFSSQL

SEQ ID NO: 2818 - protein, 442 aa, Homo sapiens
  MISC_FEATURE (2): Xaa equals any of the twenty naturally occurring L-amino acids
  MISC_FEATURE (144): Xaa equals any of the twenty naturally occurring L-amino acids
HXPRLPALPPRLLSPSAATMSASAVFILDVKGKPLISRNYKGDVAMSKIEHFMPLLVQREEEGALAPLLSHGQVHFLWIKHSNLYLVATTSKNANASLVYSFLYKTIEVFCEYFKELEEESIRDNFVIVYELLDELMDFGFPQXTDSKILQEYITQQSNKLETGKSRVPPTVTNAVSWRSEGIKYKKNEVFIDVIESVNLLVNANGSVLLSEIVGTIKLKVFLSGMPELRLGLNDRVLFELTGRSKNKSVELEDVKFHQCVRLSRFDNDRTISFIPPDGDFELMSYRLSTQVKPLIWIESVIEKFSHSRVEIMVKAKGQFKKQSVANGVEISVPVPSDADSPRFKTSVGSAKYVPERNVVIWSIKSFPGGKEYLMRAHFGLPSVEKEEVEGRPPIGVKFEIPYFTVSGIQVRYMKIIEKSGYQALPWVRYITQSGDYQLRTS

SEQ ID NO: 2819 - protein, 403 aa, Homo sapiens
  MISC_FEATURE (4): Xaa equals any of the twenty naturally occurring L-amino acids
  MISC_FEATURE (5): Xaa equals any of the twenty naturally occurring L-amino acids
  MISC_FEATURE (370): Xaa equals any of the twenty naturally occurring L-amino acids
WEQXXELHRGGGRSRTSGSPGLQEFGTSNMAAPALGLVCGRCPELGLVLLLLLLSLLCGAAGSQEAGTGAGAGSLAGSCGCGTPQRPGAHGSSAAAHRYSREANAPGPVPGERQLAHSKMVPIPAGVFTMGTDDPQIKQDGEAPARRVTIDAFYMDAYEVSNTEFEKFVNSTGYLTEAEKFGDSFVFEGMLSEQVKTNIQQAVAAAPWWLPVKGANWRHPEGPDSTILHRPDHPVLHVSWNDAVAYCTWAGKRLPTEAEWEYSCRGGLHNRLFPWGNKLQPKGQHYANIWQGEFPVTNTGEDGFQGTAPVDAFPPNGYGLYNIVGNAWEWTSDWWTVHHSVEETLNPKGPPSGKDRVKKGGSYMCHRSYXYRYRCAARSQNTPDSSASNLGFRCAADRLPTMD

SEQ ID NO: 2820 - protein, 110 aa, Homo sapiens
PLEDISFGLRVLMAAEPLTELEESIETVVTTFFTFARQEGRKDSLSVNEFKELVTQQLPHLLKDVGSLDEKMKSLDVNQDSELKFNEYWRLIGELAKEIRKKKDLKIRKK

SEQ ID NO: 2821 - protein, 240 aa, Homo sapiens
  MISC_FEATURE (188): Xaa equals any of the twenty naturally occurring L-amino acids
  MISC_FEATURE (189): Xaa equals any of the twenty naturally occurring L-amino acids
RSRDPFADQRVTRMMAAGAALALALWLLMPPVEVGGAGPPPIQDGEFTFLLPAGRKQCFYQSAPANASLETEYQVIGGAGLDVDFTLESPQGVLLVSESRKADGVHTVEPTEAGDYKLCFDNSFSTISEKLVFFELIFDSLQDDEEVEGWAEAVEPEEMLDVKMEDIKESIETMRTRLERTFQMLTLXXAFEARDRNLQEGNLERVNFWSAVNVAVLLLVAVLQVCTLKRFFQDKRPVPT

SEQ ID NO: 2822 - protein, 74 aa, Homo sapiens
REQKLELHAVAAALELVDPPGCRNSAREPEQFSSYLTSPDVGFSSYELVATPHNTSKGFQRPVYLFHKARSPSH

SEQ ID NO: 2823 - protein, 143 aa, Homo sapiens
FPGRPTRPPTRPADNMAAFMLGSLLRTFKQMVPSSASGQVRSHYVDWRMWRDVKRRKMAYEYADERLRINSLRKNTILPKILQDVADEEIAALPRDSCPVRIRNRCVMTSRPRGVKRRWRLSRIVFRHLADHGQLSGIQRATW

SEQ ID NO: 2824 - protein, 105 aa, Homo sapiens
  MISC_FEATURE (28): Xaa equals any of the twenty naturally occurring L-amino acids
  MISC_FEATURE (63): Xaa equals any of the twenty naturally occurring L-amino acids
RCCLPEDGKADIVRAAQDFCQLVAQKQXRPTDLDVDTLASLLSSNGCPDPDLVLKFGPVDSTXGFLPWHIRLTEIVSLPSHLNISYEDFFSALRQYAACEQRLGK

SEQ ID NO: 2825 - protein, 138 aa, Homo sapiens
  MISC_FEATURE (60): Xaa equals any of the twenty naturally occurring L-amino acids
  MISC_FEATURE (117): Xaa equals any of the twenty naturally occurring L-amino acids
AQCATLIIPTTPSNFSLSVVSAPQAAYPPGASMVRPPVVPRRPPAHISSVRQASTQVPRXVPHTQRVANIGTQTTGPSGVGCCTPGRPLLPCKCSSAAHSTYRVQEPAVHIPGQEPXTASMLAAAPLHGAKADDWGSV

SEQ ID NO: 2826 - protein, 35 aa, Homo sapiens
KPIWQFLKKLTTANYKTNPAIPFQGTYPDELQIGT

SEQ ID NO: 2827 - protein, 324 aa, Homo sapiens
  MISC_FEATURE (230): Xaa equals any of the twenty naturally occurring L-amino acids
DTPALIRLTIGKAGTPAGTGPEFPGRPTRPNLANLIMNEIVDNGTAVKFDDIAGQDLAKQALQEIVILPSLRPELFTGLRAPARGLLLFGPPGNGKTMLAKAVAAESNATFFNISAASLTSKYVGEGEKLVRALFAVARELQPSIIFIDEVDSLLCERREGEHDASRRLKTEFLIEFDGVQSAGDDRVLVMGATNRPQELDEAVLRRFIKRVYVSLPNEETRLLLLKNLXCKQGSPLTQKELAQLARMTDGYSGSDLTALAKDAALGPIRELKPEQVKNMSASEMRNIRLSDFTESLKKIKRSVSPQTLEAYIRWNKDFGDTTV

SEQ ID NO: 2828 - protein, 322 aa, Homo sapiens
AGGPRAAHPVCLCLLQSSVLALVRLRPGCTAGTWAMSPHPTALLGLVLCLAQTIHTQEEDLPRPSISAEPGTVIPLGSHVTFVCRGPVGVQTFRLERESRSTYNDTEDVSQASPSESEARFRIDSVSEGNAGPYRCIYYKPPKWSEQSDYLELLVKETSGGPDSPDTEPGSSAGPTQRPSDNSHNEHAPASQGLKAEHLYILIGVSVVFLFCLLLLVLFCLHRQNQIKQGPPRSKDEEQKPQQRPDLAVDVLERTADKATVNGLPEKDRETDTSALAAGSSQEVTYAQLDHWALTQRTARAVSPQSTKPMAESITYAAVARH

SEQ ID NO: 2829 - protein, 604 aa, Homo sapiens
  MISC_FEATURE (7): Xaa equals any of the twenty naturally occurring L-amino acids
  MISC_FEATURE (9): Xaa equals any of the twenty naturally occurring L-amino acids
  MISC_FEATURE (18): Xaa equals any of the twenty naturally occurring L-amino acids
  MISC_FEATURE (22): Xaa equals any of the twenty naturally occurring L-amino acids
SQVVKTXNXTTTTVTTTXSNNXTAPTNATYPMPTAKEHYPVSSPSSPSPPAQPGGVSRNSPLDCGSASPNKVASSSEQEAGSPPVVETTNTRPPNSSSSSGSSSAHSNQQQPPGSVSQEPRPPLQQSQVPPPEVRMTVPPLATSSAPVAVPSTAPVTYPMPQTPMGCPQPTPKMETPAIRPPPHGTTAPHKNSASVQNSSVAVLSVNHIKRPHSVPSSVQLPSTLSTQSACQNSVHPANKPIAPNFSAPLPFGPFSTLFENSPTSAHAFWGGSVVSSQSTPESMLSGKSSYLPNSDPLHQSDTSKAPGFRPPLQRPAPSPSGIVNMDSPYGSVTPSSTHLGNFASNISGGQMYGPGAPLGGAPAAANFNRQHFSPLSLLTPCSSASNDSSAQSVSSGVRAPSPAPSSVPLGSEKPSNVSQDRKVPVPIGTERSARIRQTGTSAPSVIGSNLSTSVGHSGIWSFEGIGGNQDKVDWCNPGMGNPMIHRPMSDPGVFSQHQAMERDSTGIVTPSGTFHQHVPAGYMDFPKVGGMPFSVYGNAMIPPVAPIPDGAGGPIFNGPHAADPSWNSLIKMVSSSTENNGPQTVWTGPWAPHMNSVHMNQLG

SEQ ID NO: 2830 - protein, 145 aa, Homo sapiens
  MISC_FEATURE (70): Xaa equals any of the twenty naturally occurring L-amino acids
QASNGDASTLGEETKSASNVPSGKSTDEEEEAQTPQAPRTLGPSPPAPSSTPTPTAPIATLNQPPPLLRXTLPAAPALHRQPPPLQQQARFIQPRPTLNQPPPPLIRPANSMPPRLNPRPVLSTVGGQQPPSLIGIQTDSQSSLH

SEQ ID NO: 2831 - protein, 206 aa, Homo sapiens
GKGKVLSHPVPPSQDCKMEEGGNLGGLIKMVHLLVLSGAWGMQMWVTFVSGFLLFRSLPRHTFGLVQSKLFPFYFHISMGCAFINLCILASQHAWAQLTFWEASQLYLLFLSLTLATVNARWLEPRTTAAMWALQTVEKERGLGGEVPGSHQGPDPYRQLREKDPKYSALRQNFFRYHGLSSLCNLGCVLSNGLCLAGLALEIRSL

SEQ ID NO: 2832 - protein, 120 aa, Homo sapiens
GGITKPKISAVKPASAARGAAALRRSINQPVAFVRRIPWTAASSQLKEHFAQFGHVRRCILPFDKETGFHRGLGWVQFSSEEGLRNALQQENHIIDGVKVQVHTRRPKLPQTSDDEKKDF

SEQ ID NO: 2833 - protein, 284 aa, Homo sapiens
REQKLELHRGGGRSRTSGSPGLQEFGTSHSRKIPRPKPAPLTAEIQQKILHLPTSWDWRNVHGINFVSPVRNQASCGSCYSFASMGMLEARIRILTNNSQTPILSPQEVVSCSQYAQGCEGGFPYLIAGKYAQDFGLVEEACFPYTGTDSPCKMKEDCFRYYSSEYHYVGGFYGGCNEALMKLELVHHGPMAVAFEVYDDFLHYKKGIYHHTGLRDPFNPFELTNHAVLLVGYGTDSASGMDYWIVKNSWGTGWGENGYFRIRRGTDECAIESIAVAATPIPKL

SEQ ID NO: 2834 - protein, 255 aa, Homo sapiens
  MISC_FEATURE (11): Xaa equals any of the twenty naturally occurring L-amino acids
  MISC_FEATURE (233): Xaa equals any of the twenty naturally occurring L-amino acids
LFWGALNNCRXSREADPHFLLKDVLSNIEATGLSTEGIYRVSGNKSEMESLQRQFDQDHNLDLAEKDFTVNTVAGAMKSFFSELPDPLVPYNMQIDLVEAHKINDREQKLHALKEVLKKFPKENHEVFKYVISHLNKVSHNNKVNLMTSENLSICFWPTLMRPDFSTMDALTATRTYQTIIELFIQQCPFFFYNRPITEPPGARPSSPSAVASTVPFLTSTPVTSQPSPPQSXPPTPQSPMQPLLPSQLQAEHTL

SEQ ID NO: 2835 - protein, 144 aa, Homo sapiens
CEKTTEGALPSSTAAASFFCRSWCCLCARLVRTWYLFCEAAAEETPALAMADEKPKEGVKTENNDHINLKVAGQDGSVVQFKIKRHTPLSKLMKAYCERQGLSMRQIRFRFDGQPINETDTPAQLEMEDEDTIDVFQQQTGGVY

SEQ ID NO: 2836 - protein, 173 aa, Homo sapiens
  MISC_FEATURE (16): Xaa equals any of the twenty naturally occurring L-amino acids
GPHRGTTRFRTSAPGXGGPSWTRERTLVAVKPDGVQRRLVGDVIQRFERRGFTLVGMKMLQAPESVLAEHYQDLRRKPFYPALIRYMSSGPVVAMVWEGYNVVRASRAMIGHTDSAEAAPGTIRGDFSVHISRNVIHASDSVEGAQREIQLWFQSSELVSWADGGQHSSIHPA

SEQ ID NO: 2837 - protein, 513 aa, Homo sapiens
TLRSRPAGEAGYLGWDPEQAGEGSALSRPGAMAALMTPGTGAPPAPGDFSGEGSQGLPDPSPEPKQLPELIRMKRDGGRLSEADIRGFVAAVVNGSAQGAQIGAMLMAIRLRGMDLEETSVLTQALAQSGQQLEWPEAWRQQLVDKHSTGGVGDKVSLVLAPALAACGCKVPMISGRGLGHTGGTLDKLESIPGFNVIQSPEQMQVLLDQAGCCIVGQSEQLVPADGILYAARDVTATVDSLPLITASILSKKLVEGLSALVVDVKFGGAAVFPNQEQARELAKTLVGVGASLGLRVAAALTAMDKPLGRCVGHALEVEEALLCMDGAGPPDLRDLVTTLGGALLWLSGHAGTQAQGAARVAAALDDGSALGRFERMLAAQGVDPGLARALCSGSPAERRQLLPRAREQEELLAPADGTVELVRALPLALVLHELGAGRSRAGEPLRLGVGAELLVDVGQRLRRGTPWLRVHRDGPALSGPQSRALQEALVLSDRAPFAAPSPFAELVLPPQQ

SEQ ID NO: 2838 - protein, 43 aa, Homo sapiens
QERAHLNDLENIIPFLGIGLLYSLSGPDPSTAILHFRLFVGAR

SEQ ID NO: 2839 - protein, 192 aa, Homo sapiens
LRPARAATVPALRATRRRDRLAASSSSASPFQTKIEKMVDLTQVMDDEVFMAFASYATIILSKMMLMSTATAFYRLTRKVFANPEDCVAFGKGENAKKYLRTDDRVERVRRAHLNDLENIIPFLGIGLLYSLSGPDPSTAILHFRLFVGARIYHTIAYLTPLPQPNRALSFFVGYGVTLSMAYRLLKSKLYL

SEQ ID NO: 2840 - protein, 169 aa, Homo sapiens
  MISC_FEATURE (6): Xaa equals any of the twenty naturally occurring L-amino acids
  MISC_FEATURE (77): Xaa equals any of the twenty naturally occurring L-amino acids
  MISC_FEATURE (107): Xaa equals any of the twenty naturally occurring L-amino acids
  MISC_FEATURE (108): Xaa equals any of the twenty naturally occurring L-amino acids
  MISC_FEATURE (122): Xaa equals any of the twenty naturally occurring L-amino acids
  MISC_FEATURE (155): Xaa equals any of the twenty naturally occurring L-amino acids
  MISC_FEATURE (169): Xaa equals any of the twenty naturally occurring L-amino acids
LLTQSXSIMFQAFSKENSFTIQYILDTSDKLSTELFQDKSEEASLDLVFELVNQLQYHTHQENGIEICMDFLQGTCXYGRDCLKHHTVLPYHWQIKRTTTQKWQSVXXDSQEHLERFYCNPXNDRMRMKYGGQEFWADLNAMNVYETTEFDQLRXLSTPPSSNVNFIYX

SEQ ID NO: 2841 - protein, 806 aa, Homo sapiens
  MISC_FEATURE (9): Xaa equals any of the twenty naturally occurring L-amino acids
  MISC_FEATURE (11): Xaa equals any of the twenty naturally occurring L-amino acids
  MISC_FEATURE (19): Xaa equals any of the twenty naturally occurring L-amino acids
NKAELFTQXCXDLDKWLHXLESQIQSDDYGKDLTSVNILLKKQQMLENQMEVRKKEIEELQSQAQALSQEGKSTDEVDSKRLTVQTKFMELLEPLNERKHNLLASKEIHQFNRDVEDEILWVGERMPLATSTDHGHNLQTVQLLIKKNQTLQKEIQGHQPRIDDIFERSQNIVTDSSSLSAEAIRQRLADLKQLWGLLIEETEKRHRRLEEAHRAQQYYFDAAEAEAWMSEQELYMMSEEKAKDEQSAVSMLKKHQILEQAVEDYAETVHQLSKTSRALVADSHPESERISMRQSKVDKLYAGLKDLAEERRGKLDERHRLFQLNREVDDLEQWIAEREVVAGSHELGQDYEHVTMLQERFREFARDTGNIGQERVDTVNHLADELINSGHSDAATIAEWKDGLNEAWADLLELIDTRTQILAASYELHKFYHDAKEIFGRIQDKHKKLPEELGRDQNTVETLQRMHTTFEHDIQALGTQVRQLQEDAARLQAAYAGDKADDIQKRENEVLEAWKSLLDACESRRVRLVDTGDKFRFFSMVRDLMLWMEDVIRQIEAQEKPRDVSSVELLMNNHQGIKAEIDARNDSFTTCIELGKSLLARKHYASEEIKEKLLQLTEKRKEMIDKWEDRWEWLRLILEVHQFSRDASVAEAWLLGQEPYLSSREIGQSVDEVEKLIKRHEAFEKSAATWDERFSALERLTTLELLEVRRQQEEEERKRRPLLPSRARRFQRKPSPSSSGILQKENKFPKTVCQLNRDLHGLVTALKPTKTTKTLIADGQPVTSHGLDCEVHYHLSRITLSKSSGF

SEQ ID NO: 2842 - protein, 150 aa, Homo sapiens
RILYIPYQWRSLEDLASPECAIDCMILMKVPIPTPRMKTPFFIFNLAETAHMPSKVKAQLYAQAYDLYKEIVYLQKEHPVNWHKNYAIACERMLRLQARDADPEVLLSETIRHFRLYSQKAPNDPQQADILGALKHLRKELQSLRNRKNV

SEQ ID NO: 2843 - protein, 414 aa, Homo sapiens
SRAPCPPTPQEGLDDGPDFLSEEDRGLKAINVDLQSDAALQVDISDALSERDKVKFTVHTKSSLPNFKQNEFSVVRQHEEFIWLHDSFVENEDYAGYIIPPAPPRPDFDASREKLQKLGEGEGSMTKEEFTKMKQELEAEYLAIFKKTVAMHEVFLCRVAAHPILRRDLNFHVFLEYNQDLSVRGKNKKEKLEDFFKNMVKSADGVIVSGVKDVDDFFEHERTFLLEYHNRVKDASAKSDRMTRSHKSAADDYNRIGSSLYALGTQDSTDICKFFLKVSELFDKTRKIEARVSADEDLKLSDLLKYYLRESQAAKDLLYRRSRSLVDYENANKALDKARAKNKDVLQAETSQQLCCQKFEKISESAKQELIDFKTRRVAAFRKNLVELAELELKHAKGNLQLLQNCLAVLNGDT

SEQ ID NO: 2844 - protein, 197 aa, Homo sapiens
VRPLAHCSGAGTWLQVLETIGVLAVIANGMVIAFTSEFIPRVVYKYRYSPCLKEGNSTVDCLKGYVNHSLSVFHTKDFQDPDGIEGSENVTLCRYRDYRNPPDYNFSEQFWFLLAIRLAFVILFEHVALCIKLIAAWFVPDIPQSVKNKVLEVKYQRLREKMWHGRQRLGGVGAGSRPPMPAHPTPASIFSARSTDV

SEQ ID NO: 2845 - protein, 353 aa, Homo sapiens
GAATQHGGAMNLLPCNPHGNGLLYAGFNQDHGCFACGMENGFRVYNTDPLKEKEKQEFLEGGVGHVEMLFRCNYLALVGGGKKPKYPPNKVMIWDDLKKKTVIEIEFSTEVKAVKLRRDRIVVVLDSMIKVFTFTHNPHQLHVFETCYNPKGLCVLCPNSNNSLLAFPGTHTGHVQLVDLASTEKPPVDIPAHEGVLSCIALNLQGTRIATASEKGTLIRIFDTSSGHLIQELRRGSQAANIYCINFNQDASLICVSSDHGTVHIFAAEDPKRNKQSSLASASFLPKYFSSKWSFSKFQVPSGSPCICAFGTEPNAVIAICADGSYYKFLFNPKGECIRDVYAQFLEMTDDKL

SEQ ID NO: 2846 - protein, 347 aa, Homo sapiens
  MISC_FEATURE (204): Xaa equals any of the twenty naturally occurring L-amino acids
  MISC_FEATURE (240): Xaa equals any of the twenty naturally occurring L-amino acids
CPLLGGKGFVTKQTTKHVHHHYIHHHAVPKTKEEIEAEATQRVHCFCPGGSEYYCYSKCKSHSKAPETMPSEQFGGSRGSTLPKRNGKGTEPGLALPAREGGAPGGAGALQLPREEGDRSQDVWQWMLESERQSKPKPHSAQSTKKAYPLESARSSPGERASRHHLWGGNSGHPRTTPRAHLFTQDPAMPPLTPPNTLAQLEEXCRRLAEVSKPPKQRCCVASQQRDRNHSATVQTGATXFSNPSLAPEDHKEPKKLAGVHALQASELVVTYFFCGEEIPYRRMLKAQSLTLGHFKEQLSKKGNYRYYFKKASDEFACGAVFEEIWEDETVLPMYEGRILGKVERID

SEQ ID NO: 2847 - protein, 119 aa, Homo sapiens
  MISC_FEATURE (6): Xaa equals any of the twenty naturally occurring L-amino acids
  MISC_FEATURE (12): Xaa equals any of the twenty naturally occurring L-amino acids
  MISC_FEATURE (21): Xaa equals any of the twenty naturally occurring L-amino acids
  MISC_FEATURE (73): Xaa equals any of the twenty naturally occurring L-amino acids
  MISC_FEATURE (90): Xaa equals any of the twenty naturally occurring L-amino acids
  MISC_FEATURE (115): Xaa equals any of the twenty naturally occurring L-amino acids
PPGWLXCLPFIXASCLSPLAXPSCHLLLGKAGGMNVDSQPLCFDSLGPGMGPLCPQGSEVTNSKSRDVYKLPXPTPPGPPEMPADPASIXTAPEIRAPLTITLLARPLTFTLIYXNMHA

SEQ ID NO: 2848 - protein, 204 aa, Homo sapiens
SRMATLIYVDKENGEPGTRVVAKDGLKLGSGPSIKALDGRSQVSTPRFGKTFDAPPALPKATRKALGTVNRATEKSVKTKGPLKQKQPSFSAKKMTEKTVKAKSSVPASDDAYPEIEKFFPFNPLDFESFDLPEEHQIAHLPLSGVPLMILDEERELEKLFQLGPPSPVKMPSPPWESNLLQSPSSILSTLDVELPPVCCDIDI

SEQ ID NO: 2849 - protein, 549 aa, Homo sapiens
WDLRLQVRLGQSASASSGLVVARPTSAVPAEPRPFRPSPPHLAAMRLRRLALFPGVALLLAAARLAAASDVLELTDDNFESRISDTGSAGLMLVEFFAPWCGHCKRLAPEYEAAATRLKGIVPLAKVDCTANTNTCNKYGVSGYPTLKIFRDGEEAGAYDGPRTADGIVSHLKKQAGPASVPLRTEEEFKKFISDKDASIVGFFDDSFSEAHSEFLKAASNLRDNYRFAHTNVESLVNEYDDNGEGIILFRPSHLTNKFEDKTVAYTEQKMTSGKIKKFIQENIFGICPHMTEDNKDLIQGKDLLIAYYDVDYEKNAKGSNYWRNRVMMVAKKFLDAGHKLNFAVASRKTFSHELSDFGLESTAGEIPVVAIRTAKGEKFVMQEEFSRDGKALERFLQDYFDGNLKRYLKSEPIPESNDGPVKVVVAENFDEIVNNENKDVLIEFYAPWCGHCKNLEPKYKELGEKLSKDPNIVIAKMDATANDVPSPYEVRGFPTIYFSPANKKLNPKKYEGGRELSDFISYLQREATNPPVIQEEKPKKKKKAQEDL

SEQ ID NO: 2850 - protein, 414 aa, Homo sapiens
SSKMSKRPSYAPPPTPAPATQMPSTPGFVGYNPYSHLAYNNYRLGGNPGTNSRVTASSGITIPKPPKPPDKPLMPYMRYSRKVWDQVKASNPDLKLWEIGKIIGGMWRDLTDEEKQEYLNEYEAEKIEYNESMKAYHNSPAYLAYINAKSRAEAALEEESRQRQSRMEKGEPYMSIQPAEDPDDYDDGFSMKHTATARFQRNHRLISEILSESVVPDVRSVVTTARMQVLKRQVQSLMVHQRKLEAELLQIEERHQEKKRKFLESTDSFNNELKRLCGLKVEVDMEKIAAEIAQAEEQARKRQEEREKEAAEQAERSQSSIVPEEEQAANKGEEKKDDENIPMETEETHLEETTESQQNGEEGTSTPEDKESGQEGVDSMAEEGTSDSNTGSESNSATVEEPPTDPIPEDEKKE

SEQ ID NO: 2851 - protein, 386 aa, Homo sapiens
  MISC_FEATURE (127): Xaa equals any of the twenty naturally occurring L-amino acids
EQNIGDIFLKYSKDLVKTYPPFVNFFEMSKETIIKCEKQKPRFHAFLKINQAKPECGRQSLVELLIRPVQRLPSVALLLNDLKKHTADENPDKSTLEKAIGSLKEVMTHINEDKRKTEAQKQIFDVXYEVDGCPANLLSSHRSLVQRVETISLGEHPCDRGEQVTLFLFNDCLEIARKRHKVIGTFRSPHGQTRPPASLKHIHLMPLSQIKKVLDIRETEDCHNAFALLVRPPTEQANVLLSFQMTSDELPKENWLKMLCRHVANTICKADAENLIYTADPESFEVNTKDMDSTLSRASRAIKKTSKKVTRAFSFSKTPKRALRRALMTSHGSVEGRSPSSNDKHVMSRLSSTSSLAGIPSPSLVSLPSFFERRSHTLSRSTTHLI

SEQ ID NO: 2852 - protein, 201 aa, Homo sapiens
  MISC_FEATURE (35): Xaa equals any of the twenty naturally occurring L-amino acids
GTSWRGGLRQSLMQCQGSKTRPRSDVLFFKDFHQXSQNLLLWLASAKNRRQKAHVTDPKADPRALLECRRELMQLEKELVERQPQVDMLQEISNSLLIKGHGEDCIEAEEKVHVIEKKLKQLREQVSQDLMALQGTQNPASPLPSFDEVDSGDQPPATSVPAPRAKFRAVRTTEGEEETESRVPGSRKAGEFPMYSIYVSF

SEQ ID NO: 2853 - protein, 654 aa, Homo sapiens
  MISC_FEATURE (7): Xaa equals any of the twenty naturally occurring L-amino acids
  MISC_FEATURE (22): Xaa equals any of the twenty naturally occurring L-amino acids
  MISC_FEATURE (29): Xaa equals any of the twenty naturally occurring L-amino acids
  MISC_FEATURE (45): Xaa equals any of the twenty naturally occurring L-amino acids
NTRRSTXQVYTFNSGRKSMSTXLKNSDGXYRIFSKGASEIILKKXFKILSANGEAKVFRPRDRDDIVKTVIEPMASEGLRTICLAFRDFPAGEPEPEWDNENDIVTGLTCIAVVGIEDPVRPEVPDAIKKCQRAGITVRMVTGDNINTARAIATKCGILHPGEDFLCLEGKDFNRRIRNEKGEIEQERIDKIWPKLRVLARSSPTDKHTLVKGIIDSTVSDQRQVVAVTGDGTNDGPALKKADVGFAMGIAGTDVAKEASDIILTDDNFTSIVKAVMWGRNVYDSISKFLQFQLTVNVVAVIVAFTGACITQDSPLKAVQMLWVNLIMDTLASLALATEPPTESLLLRKPYGRNKPLISRTMMKNILGHAFYQLVVVFTLLFAGEKFFDIDSGRNAPLHAPPSEHYTIVFNTFVLMQLFNEINARKIHGERNVFEGIFNNAIFCTIVLGTFVVQIIIVQFGGKPFSCSELSIEQWLWSIFLGMGTLLWGQLISTIPTSRLKFLKEAGHGTQKEEIPEEELAEDVEEIDHAERELRRGQILWFRGLNRIQTQIRVVNAFRSSLYEGLEKPESRSSIHNFMTHPEFRIEDSEPHIPLIDDTDAEDDAPTKRNSSPPPSPNKNNNAVDSGIHLTIEMNKSATSSSPGSPLHSLETSL

SEQ ID NO: 2854 - protein, 239 aa, Homo sapiens
  MISC_FEATURE (216): Xaa equals any of the twenty naturally occurring L-amino acids
  MISC_FEATURE (222): Xaa equals any of the twenty naturally occurring L-amino acids
  MISC_FEATURE (227): Xaa equals any of the twenty naturally occurring L-amino acids
  MISC_FEATURE (235): Xaa equals any of the twenty naturally occurring L-amino acids
IPEFWLTVFKNVDLLSDMVQEHDEPILKHLKDIKVKFSDAGQPMSFVLEFHFEPNEYFTNEVLTKTYRMRSEPDDSDPFSFDGPEIMGCTGCQIDWKKGKNVTLKTIKKKQKHKGRGTVRTVTKTVSNDSFFNFFAPPEVPESGDLDDDAEAILAADFEIGHFLRERIIPRSVLYFTGEAIEDDDDDYDEEGEEADEEGEEEGDEENDPDYDPKKXQNPAEXQAAVXAGMSTFCXPGKG

SEQ ID NO: 2855 - protein, 51 aa, Homo sapiens
  MISC_FEATURE (8): Xaa equals any of the twenty naturally occurring L-amino acids
EFLVYYFXDDDDDYDEEGEEADEEGEEEGDEENDPDYDPKKDQNPAECKQQ

SEQ ID NO: 2856 - protein, 131 aa, Homo sapiens
IYTSLFNFIKISQSSSRVLAQSSTSEEPDENSSSVTSCQASLWMGRVKQLTDEEECCICMDGRADLILPCAHSFCQKCIDKWSDRHRNCPICRLQMTGANESWVVSDAPTEDDMANYILNMADEAGQPHRP

SEQ ID NO: 2857 - protein, 231 aa, Homo sapiens
EQRRAVALTPGFQPRGPLPWRFSVLRIMSLRGSLSRLLQTRVHSILKKSVHSVAVIGAPFSQGQKRKGVEHGPAAIREAGLMKRLSSLGCHLKDFGDLSFTPVPKDDLYNNLIVNPRSVGLANQELAEVVSRAVSDGYSCVTLGGDHSLAIGTISGHARHCPDLCVVWVDAHADINTPLTTSSGNLHGQPVSFLLRELQDKVPQLPGFSWDQTLYLSCKYCVYWSERRGPS

SEQ ID NO: 2858 - protein, 143 aa, Homo sapiens
  MISC_FEATURE (125): Xaa equals any of the twenty naturally occurring L-amino acids
APAQLPRNFCWSASATSLTLSHCVDVVKGLLDFKKRRGHSIGGAPEQRYQIIPVCVAARLPTRAQDVLDAHLSEVNAVRFGPNSSLLATGGADRLIHLWNVVGSRLEANQTLEGAGGSITSVDFXPSGYQVLAATYNQAAQLW

SEQ ID NO: 2859 - protein, 137 aa, Homo sapiens
  MISC_FEATURE (16): Xaa equals any of the twenty naturally occurring L-amino acids
  MISC_FEATURE (113): Xaa equals any of the twenty naturally occurring L-amino acids
  MISC_FEATURE (114): Xaa equals any of the twenty naturally occurring L-amino acids
QRSGSVYVSASSAERXCRACSIELDVVPAAPEDGQGCGDRGDPPGDLRSVLVTTVLNLEPLDEDLFRGRHYWVPAKRLFGGQIVGQALVAAAKSVSEDVHVHSLHCYFVRAEXXPSCVLRRSPAEKSLWTFTVCDLY

SEQ ID NO: 2860 - protein, 204 aa, Homo sapiens
  MISC_FEATURE (87): Xaa equals any of the twenty naturally occurring L-amino acids
  MISC_FEATURE (97): Xaa equals any of the twenty naturally occurring L-amino acids
  MISC_FEATURE (99): Xaa equals any of the twenty naturally occurring L-amino acids
  MISC_FEATURE (169): Xaa equals any of the twenty naturally occurring L-amino acids
  MISC_FEATURE (178): Xaa equals any of the twenty naturally occurring L-amino acids
HFFFSPELLLFSIYFFYFLDLWFFDICVLLSRSFSACICPSDASLFLAPSLYFPVFLLPFFLCGPGPVLNQLEELLSDMKADVTRLXATLSRIPPIXAXLQMSERSILSRLASKGTEPHPTPAYPPGPYATPPGYGAAFSAAPVGALAAAGANYSQMPAGSFITAAPTXLQCLGKKEXEMVGALVSDGLDRKEPRAGEVICIDD

SEQ ID NO: 2861 - protein, 307 aa, Homo sapiens
  MISC_FEATURE (3): Xaa equals any of the twenty naturally occurring L-amino acids
  MISC_FEATURE (24): Xaa equals any of the twenty naturally occurring L-amino acids
SGXAQQRLTHLPCGEGSRQAAVMXVSESQLKKMVSKPQSDLLGLIQVMIVVFGDEPPVFSRPISASYPPYQATGPPNTSYMPGMPGGISPYPSGYPPNPSGYPGCPYPPGGPYPATTSSQYPSQPPVTTVGPSRDGTISEDTIRASLISAVSDKLRWRMKEEMDRAQAELNALKRTEEDLKKGHQKLEEMVTRLDQEVAEVDKNIELLKKKDEELSSALEKMENQSENNDIDEVIIPTAPLYKQILNLYAEENAIEDTIFYLGEALRRGVIDLDVFLKHVRLLSRKQFQLRALMQKARKTAGLSDLY

SEQ ID NO: 2862 - protein, 118 aa, Homo sapiens
  MISC_FEATURE (81): Xaa equals any of the twenty naturally occurring L-amino acids
SPPTVSGLTKNPVSLPSLPNPTKPNNVPSVPSPSIQRTLLPVLHHWEQHLLCSCSNTHSIYKPQGLLYPQWPIRLYSPSTXSRSYTDGKFQFLHLVLRLLQNRTAIPPQELKTRQTKQ

SEQ ID NO: 2863 - protein, 134 aa, Homo sapiens
  MISC_FEATURE (36): Xaa equals any of the twenty naturally occurring L-amino acids
  MISC_FEATURE (64): Xaa equals any of the twenty naturally occurring L-amino acids
  MISC_FEATURE (73): Xaa equals any of the twenty naturally occurring L-amino acids
  MISC_FEATURE (77): Xaa equals any of the twenty naturally occurring L-amino acids
  MISC_FEATURE (111): Xaa equals any of the twenty naturally occurring L-amino acids
  MISC_FEATURE (126): Xaa equals any of the twenty naturally occurring L-amino acids
  MISC_FEATURE (133): Xaa equals any of the twenty naturally occurring L-amino acids
AQENEEMEQPMQNGEEDRPLGGGEGHQPAGNRRGQXRRLAPNFRWAIPNRQINDGMGGDGDDMXIFMEEMREXRRKXRELQLRNCLRILMGELSNHHDHHDEFCLCLDSCXYHEINTVIPRWFLFXCIFLICXY

SEQ ID NO: 2864 - protein, 143 aa, Homo sapiens
  MISC_FEATURE (26): Xaa equals any of the twenty naturally occurring L-amino acids
GAADGSGVGAEAELQANPFYDRYRDXIQLLRRSDPAAFESRLEKRSEFRKQPVGHSRQGDFIKCVEQKTDALGKQSVNRGFTKDKTLSSIFNIEMVKEKTAEEIKQIWQQYFAAKDTVYAVIPAEKFDLIWNRAQSCPTVSFW

SEQ ID NO: 2865 - protein, 297 aa, Homo sapiens
SHVFPPLRLTSTLHSMAVPETRPNHTIYINNLNEKIKKDELKKSLYAIFSQFGQILDILVSRSLKMRGQAFVIFKEVSSATNALRSMQGFPFYDKPMRIQYAKTDSDIIAKMKGTFVERDRKREKRKPKSQETPATKKAVQGGGATPVVGAVQGPVPGMPPMTQAPRIMHHMPGQPPYMPPPGMIPPPGLAPGQIPPGAMPPQQLMPGQMPPAQPLSENPPNHILFLTNLPEETNELMLSMLFNQFPGFKEVRLVPGRHDIAFVEFDNEVQAGAARDALQGFKITQNNAMKISFAKK

SEQ ID NO: 2866 - protein, 163 aa, Homo sapiens
EPCLRPPPKRRGTPGAVRDPQAARLGLGPARWQSRAAAFYFVRGFRTGWSFVGWVVLGTSAKRTRLFFFLSKMAASSRAQVLSLYRAMLRESKRFSAYNYRTYAVRRIRDAFRENKNVKDPVEIQTLVNKAKRDLGVIRRQVHIGQLYSTDKLIIENRDMPRT

SEQ ID NO: 2867 - protein, 119 aa, Homo sapiens
  MISC_FEATURE (73): Xaa equals any of the twenty naturally occurring L-amino acids
  MISC_FEATURE (119): Xaa equals any of the twenty naturally occurring L-amino acids
AGPAPGAIMDEDYFGSAAEWGDEADGGQQEDDYGEGEDDAEVQQECLHKFSTRDYIMEPSIFNTLKRYFQAGXSPENVIQLLSENYTAVAQTVNLLAEWLIQTSVEPVQVQETVENHLX

SEQ ID NO: 2868 - protein, 142 aa, Homo sapiens
EATVNRLQSNEVTLTLTVPEYSNKRVSRPVQVYFYVSSFPLGLPFSPPAPFRPPPLPASPPLEGPFPSQSDVHPLPAEGYNKVGPGYGPGEGAPEQEKSRGGYSSGFRDSVPIQGITLEEVSEIIGRDLSGFPAPPGEEPPA

SEQ ID NO: 2869 - protein, 1134 aa, Homo sapiens
VLFRPQAQRPPSCVGGSAVRRWQGQPQPQRPGEEKAAAAILGGPGGGEEEKEEGGGRAWLRLLEELAAARPGEPALMSSSPLSKKRRVSGPDPKPGSNCSPAQSVLSEVPSVPTNGMAKNGSEADIDEGLYSRQLYVLGHEAMKRLQTSSVLVSGLRGLGVEIAKNIILGGVKAVTLHDQGTAQWADLSSQFYLREEDIGKNRAEVSQPRLAELNSYVPVTAYTGPLVEDFLSGFQVVVLTNTPLEDQLRVGEFCHNRGIKLVVADTRGLFGQLFCDFGEEMILTDSNGEQPLSAMVSMVTKDNPGVVTCLDEARHGFESGDFVSFSEVQGMVELNGNQPMEIKVLGPYTFSICDTSNFSDYIRGGIVSQVKVPKKISFKSLVASLAEPDFVVTDFAKFSRPAQLHIGFQALHQFCAQHGRPPRPRNEEDAAELVALAQAVNARALPAVQQNNLDEDLIRKLAYVAAGDLAPINAFIGGLAAQEVMKACSGKFMPIMQWLYFDALECLPEDKEVLTEDKCLQRQNRYDGQVAVFGSDLQEKLGKQKYFLVGAGAIGCELLKNFAMIGLGCGEGGEIIVTDMDTIEKSNLNRQFLFRPWDVTKLKSDTAAAAVRQMNPHIRVTSHQNRVGPDTERIYDDDFFQNLDGVANALDNVDARMYMDRRCVYYRKPLLESGTLGTKGNVQVVIPFLTESYSSSQDPPEKSIPICTLKNFPNAIEHTLQWARDEFEGLFKQPAENVNQYLTDPKFVERTLRLAGTQPLEVLEAVQRSLVLQRPQTWADCVTWACHHWHTQYSNNIRQLLHNFPPDQLTSSGAPFWSGPKRCPHPLTFDVNNPLHLDYVMAAANLFAQTYGLTGSQDRAAVATFLQSVQVPEFTPKSGVKIHVSDQELQSANASVDDSRLEELKATLPSPDKLPGFKMYPIDFEKDDDSNFHMDFIVAASNLRAENYDIPSADRHKSKLIAGKIIPAIATTTAAVVGLVCLELYKVVQGHRQLDSYKNGFLNLALPFFGFSEPLAAPRHQYYNQEWTLWDRFEVQGLQPNGEEMTLKQFLDYFKTEHKLEITMLSQGVSMLYSFFMPAAKLKERLDQPMTEIVSRVSKRKLGRHVRALVLELCCNDESGEDVEVPYVRYTIR

SEQ ID NO: 2870 - protein, 57 aa, Homo sapiens
MAKCDACKRQGKLSESLKWRGEMKHFCNLLCILMFCNQQSVCDPPSQNNAGKINLRY

SEQ ID NO: 2871 - protein, 146 aa, Homo sapiens
HTPLKEYYTLMDIAYIYPWRRNGPLPLKYRVQPACKRLTLATVPTPSEGTNTSGASECESVSDKAPSPATLPATSSSLPSPATPSHGSPSSHGPPATHPTSPTPPSTASGATTAANGGSLNCLQTPSSTSRGRKMTVNGAPVPPLT

SEQ ID NO: 2872 - protein, 545 aa, Homo sapiens
LFMMFGGYETIEAYEDDLYRDESSSELSVDSEVEFQLYSQIHYAQDLDDVIREEEHEEKNSGNSESSSSKPNQKKLIVLSDSEVIQLSDGSEVITLSDEDSIYRCKGKNVRVQAQENAHGLSSSLQSNELVDKKCKSDIEKPKSEERSGVIREVMIIEVSSSEEEESTISEGDNVESWMLLGCEVDDKDDDILLNLVGCENSVTEGEDGINWSISDKDIEAQIANNRTPGRWTQRYYSANKNIICRNCDKRGHLSKNCPLPRKVRRCFLCSRRGHLLYSCPAPLCEYCPVPKMLDHSCLFRHSWDKQCDRCHMLGHYTDACTEIWRQYHLTTKPGPPKKPKTPSRPSALAYCYHCAQKGHYGHECPEREVYDPSPVSPFICYYDDKYEIQEREKRLKQKIKVLKKNGVIPEPSKLPYIKAANENPHHDIRKGRASWKSNRWPQENKETQKEMKNKNRNWEKHRKADRHREVDEDFPRGPKTYSSPGSFKTQKPSKPFHRSSHYHTSREDKSPKEGKRGKQKKKERCWEDDDNDNLFLIKQRKKKS

SEQ ID NO: 2873 - protein, 215 aa, Homo sapiens
GKLVRLQVPVRNSRVDPRVRPRVRPRVRGARRRSSGSGSMSAGGASVPPPPNPAVSFPPPRVTLPAGPDILRTYSGAFVCLEILFGGLVWILVASSNVPLPLLQGWVMFVSVTAFFFSLLFLGMFLSGMVAQIDANWNFLDFAYHFTVFVFYFGAFLLEAAATSLHDLHCNTTITGQPLLSDNQYNINVAASIFAFMTTACYGCSLGLALRRWRP

SEQ ID NO: 2874 - protein, 164 aa, Homo sapiens
  MISC_FEATURE (5): Xaa equals any of the twenty naturally occurring L-amino acids
PGRTXGAEVRPGARAPATRTPGVPVYKGREQAASLEALFGALDPFPSVLTAARQTPAAKMVKQIESKTAFQEALDAAGDKLVVVDFSATWCGPCKMIKPFFHSLSEKYSNVIFLEVDVDDCQDVASECEVKCMPTFQFFKKGQKVGEFSGANKEKLEATINELV

SEQ ID NO: 2875 - protein, 304 aa, Homo sapiens
  MISC_FEATURE (1): Xaa equals any of the twenty naturally occurring L-amino acids
  MISC_FEATURE (6): Xaa equals any of the twenty naturally occurring L-amino acids
XQSRSXIPGSTHASGKVVPVTGLAVGAAVAMLSVAARSGPFAPVLSATSRGVAGALRPLVQATVPATPEQPVLDLKRPFLSRESLSGQAVRRPLVASVGLNVPASVCYSHTDIKVPDFSEYRRLEVLDSTKSSRESSEARKGFSYLVTGVTTVGVAYAAKNAVTQFVSSMSASADVLALAKIEIKLSDIPEGKNMAFKWRGKPLFVRHRTQKEIEQEAAVELSQLRDPQHDLDRVKKPEWVILIGVCTHLGCVPIANAGDFGGYYCPCHGSHYDASGRIRLGPAPLNLEVPTYEFTSDDMVIVG

SEQ ID NO: 2876 - protein, 284 aa, Homo sapiens
KHQINHRSKNNCLWTAAMRLTVLCAVCLLPGSLALPLPQEAGGMSELQWEQAQDYLKRFYLYDSETKNANSLEAKLKEMQKFFGLPITGMLNSRVIEIMQKPRCGVPDVAEYSLFPNSPKWTSKVVTYRIVSYTRDLPHITVDRLVSKALNMWGKEIPLHFRKVVWGTADIMIGFARGAHGDSYPFDGPGNTLAHAFAPGTGLGGDAHFDEDERWTDGSSLGINFLYAATHELGHSLGMGHSSDPNAVMYPTYGNGDPQNFKLSQDDIKGIQKLYGKRSNSRKK

SEQ ID NO: 2877 - protein, 224 aa, Homo sapiens
VTRGHERLRTFDFPANLGIDHFLFCRKGKAPKSTMSTRKRRGGAINSRQAQKRTREATSTPEISLEAEPIELVETAGDEIVDLTCESLEPVVVDLTHNDSVVIVDERRRPRRNARRLPQDHADSCVVSSDDEELSRDRDVYVTTHTPRNARDEGATGLRPSGTVSCPICMDGYSEIVQNGRLIVSTECGHVFCSQCLRDSLKNANTCPTCRKKINHKRYHPIYI

SEQ ID NO: 2878 - protein, 336 aa, Homo sapiens
  MISC_FEATURE (269): Xaa equals any of the twenty naturally occurring L-amino acids
  MISC_FEATURE (272): Xaa equals any of the twenty naturally occurring L-amino acids
VTRGWSPGTGKVARAASGGPSPATAAAAGGPRQASLSSRSRVFSSLSSSSCRSRLTFSFCMFLETATTSRWVCSWRPRASLSSLRICSCAPSSCVRSASCARHSWEFWACASRCSAAWACSCCSNSPAAGPRVPGPARGSAAPAPDGFSAPRGRSSDSAGAGSAPEAAPSPRTERAPPSRARSRASAAPAPGRRAPGPPPPGRPTRVSEHPRKSPAARGARAAAWPRASSQPAARPGPGPPPAAPAQCGIAPPLPPPHPESPPCPARRXRPXQRSPRESCRGSLPGLTPPPQTSRSLAQERSWGPGRSAPHTPPQLGAPRRECVQTKHGPWREEDE

SEQ ID NO: 2879 - protein, 135 aa, Homo sapiens
  MISC_FEATURE (17): Xaa equals any of the twenty naturally occurring L-amino acids
AHPDPAANGTSPGRRDXARGEAAPHGCTCPNCKDGEKRSGEQGKKKHVCHIPDCGKTFRKTSLLRAHVRLHTGERPFVCNWFFCGKRFTRSDELQRHARTHTGDKRFECAQCQKRFMRSDHLTKHYKTHLVTKNL

SEQ ID NO: 2880 - protein, 216 aa, Homo sapiens
RELCPLTGNVSLLTPPPRRRSAEHTATGQRVTPGAGVMAATEPILAATGSPAAVPPEKLEGAGSSSAPERNCVGSSLPEASPPAPEPSSPNAAVPEAIPTPRAAASAALELPLGPAPVSVAPQAEAEARSTPGPAGSRLGPETFRQRFRQFRYQDAAGPREAFRQLRELSRQWLRPDIRTKEQIVEMLVQEQLLAILPEAARARRIRRRTDVRITG

SEQ ID NO: 2881 - protein, 298 aa, Homo sapiens
  MISC_FEATURE (168): Xaa equals any of the twenty naturally occurring L-amino acids
  MISC_FEATURE (183): Xaa equals any of the twenty naturally occurring L-amino acids
ADRYERLQKICSIALVGKYTKLRDCYASVFKALEHSALAINHKLNLMYIDSIDLEKITETEDPVKFHEAWQKLCKADGILVPGGFGIRGTLGKLQAISWARTKKIPFLGVCLGMQLAVIEFARNCLNLKDADSTEFRPNAPVPLVIDMPEHNPGNLGGTMRLGIRRTXFKTENSILRKLYGDXPFIEERHRHRFEVNPNLIKQFEQNDLSFVGQDVDGDRMEIIELANHPYFVGVQFHPEFSSRPMKPSPPYLGLLLAATGNLNAYLQQGCKLSSSDRYSDASDDSFSEPRIAELEIS

SEQ ID NO: 2882 - protein, 347 aa, Homo sapiens
  MISC_FEATURE (72): Xaa equals any of the twenty naturally occurring L-amino acids
ESFLLSSCSLVCRADGYRCLADIVVATPGRLVDHIDQTPGFSLQQLRFLIIDEADRMIDSMHQSWLPRVVAXAFQSEDPADPCALLQRRQAQAVTAASTCCPQMPLQKLLFSATLTQNPEKLQQLGLHQPRLFSTGLAHRGLEDTDGDGDSGKYAFPVGLTHHYVPCSLSSKPLVVLHLVLEMGFSRVLCFTNSRENSHRLFLLVQAFGGVDVAEFSSRYGPGQRRMILKQFEQGKIQLLISTDATARGIDVQGVELVVNYDAPQYLRTYVHRVGRTARAGKTGQAFTLLLKVQERRFLRMLTEAGAPELQRHELSSKLLQPLVPRYEEALSQLEESVKEERKQRAA

SEQ ID NO: 2883 - protein, 47 aa, Homo sapiens
  MISC_FEATURE (5): Xaa equals any of the twenty naturally occurring L-amino acids
  MISC_FEATURE (6): Xaa equals any of the twenty naturally occurring L-amino acids
GNSVXXASSSWVCPQENSLCPKLTMKEHLELYAAVKGLGKDAALSIS

SEQ ID NO: 2884 - protein, 319 aa, Homo sapiens
  MISC_FEATURE (311): Xaa equals any of the twenty naturally occurring L-amino acids
DLGAWLCDDNFPDDESRHVDLGGGLKPPGYYVQRSCGLFTAPFPQDSDELERITKLFHFLGIFLAKCIQDNRLVDLPISKPFFKLMCMGDIKSNMSKLIYESRGDRDLHCTESQSEASTEEGHDSLSVGSFEEDSKSEFILDPPKPKPPAWFNGILTWEDFELVNPHRARFLKEIKDLAIKRRQILSNKGLSEDEKNTKLQELVLKNPSGSGPPLSIEDLGLNFQFCPSSRIYGFTAVDLKPSGEDEMITMDNAEEYVDLMFDFCMHTGIQKQMEAFRDGFNKVFPMEKLSSFSHEEVQMILCGNQSPSWXSRGYYQLH

SEQ ID NO: 2885 - protein, 237 aa, Homo sapiens
ETSADMAPSVPAAEPEYPKGIRAVLLGPPGAGKGTQAPRLAENFCVCHLATGDMLRAMVASGSELGKKLKATMDAGKLVSDEMVVELIEKNLETPLCKNGFLLDGFPRTVRQAEMLDDLMEKRKEKLDSVIEFSIPDSLLIRRITGRLIHPKSGRSYHEEFNPPKEPMKDDITGEPLIRRSDDNEKALKIRLQAYHTQTTPLIEYYRKRGIHSAIDASQTPDVVFASILAAFSKATS

SEQ ID NO: 2886 - protein, 280 aa, Homo sapiens
PCAPARPRHLRLAAARSAGSARLPPRMNIMDFNVKKLAADAGTFLSRAVQFTEEKLGQAEKTELDAHLENLLSKAECTKIWTEKIMKQTEVLLQPNPNARIEEFVYEKLDRKAPSRINNPELLGQYMIDAGTEFGPGTAYGNALIKCGETQKRIGTADRELIQTSALNFLTPLRNFIEGDYKTIAKERKLLQNKRLDLDAAKTRLKKAKAAETRNSSEQELRITQSEFDRQAEITRLLLEGISSTHAHHLRCLNDFVEAQMTYYAQCYQYMLDLQKQLGR

SEQ ID NO: 2887 - protein, 170 aa, Homo sapiens
  MISC_FEATURE (5): Xaa equals any of the twenty naturally occurring L-amino acids
SHFEXDKCNNCDQELNKKPQDETKESTSCPVVQKRAALLNAILHSAYSETFLLPHLKDIPAQHITLFLKYLYFLYLKCSENATMTLPGIHPPTLNQIMDWICLLLDANFTVVVMMPEAKRLLINLYKLVKSQISVYSELNKIEVSFRELQKLNQEKNNRGLYSIEVLELF

SEQ ID NO: 2888 - protein, 169 aa, Homo sapiens
  MISC_FEATURE (4): Xaa equals any of the twenty naturally occurring L-amino acids
  MISC_FEATURE (41): Xaa equals any of the twenty naturally occurring L-amino acids
RWRXAGTRAVPALGDSASGAAAIALPGLEGPATDAQCQTLXLTVLKSRSPSPRSLPPALSCPPPQPAMLEHLSSLPTQMDYKGQKLAEQMFQGIILFSAIVGFIYGYVAEQFGWTVYIVMAGFAFSCLLTLPPWPIYRRHPLKWLPVQESSTDDKKPGERKIKRHAKNN

SEQ ID NO: 2889 - protein, 512 aa, Homo sapiens
  MISC_FEATURE (29): Xaa equals any of the twenty naturally occurring L-amino acids
CAVSAEHRFCAGTTAAPLTRPQHQPATAXAILGTEGRGSFSCPKTKTDGSPKSTSSPVTTYHLQRALPGGIILMELAFQGCYFCVKQFALECSRIPMGQAVNSQLSMLFTEECDKVRDLMHVHSFSYDFHLRLVHQHVLGAHLVLRHGYHLTTFLRHFLAHHPDGPHFGRNHIYQGTLELPTPLIAAHQLYNYVADHASSYHMKPLRMARPGGPEHNEYALVSAWHSSGSYLDSEGLRHQDDFDVSLLVCHCAAPFEEQGEAERHVLRLQFFVVLTSQRELFPRLTADMRRFRKPPRLPPEPEAPGSSAGSPGEASGLILAPGPAPLFPPLAAEVGMARARLAQLVRLAGGHCRRDTLWKRLFLLEPPGPDRLRLGGRLALAELEELLEAVHAKSIGDIDPQLDCFLSMTVSWYQSLIKVLLSRFPQSCRHFQSPDLGTQYLVVLNQKFTDCFVLVFLDSHLGKTSLTVVFREPFPVQPQDSESPPAQLVSTYHHLESVINTACFTLWTRLL

SEQ ID NO: 2890 - protein, 137 aa, Homo sapiens
ARAAKGESCEGPGVGRCFSFSSYRQNSPAAKMVNVPKTRRTFCKKCGKHQPHKVTQYKKGKDSLYAQGRRRYDRKQSGYGGQTKPIFRKKAKTTKKIVLRLECVEPNCRSKRMLAIKRCKHFELGGDKKRKGQVIQF

SEQ ID NO: 2891 - protein, 293 aa, Homo sapiens
AMELRVGNKYRLGRKIGSGSFGDIYLGANIASGEEVAIKLECVKTKHPQLHIESKFYKMMQGGVGIPSIKWCGAEGDYNVMVMELLGPSLEDLFNFCSRKFSLKTVLLLADQMISRIEYIHSKNFIHRDVKPDNFLMGLGKKGNLVYIIDFGLAKKYRDARTHQHIPYRENKNLTGTARYASINTHLGIEQSRRDDLESLGYVLMYFNLGSLPWQGSKQPPSARSMNGSARRRCQRPSRSSAKAIPPNSQHTSTSAAPCGLTTSPTTLTYVSSSATSSTGRASPMTTSLTGTC

SEQ ID NO: 2892 - protein, 542 aa, Homo sapiens
  MISC_FEATURE (45): Xaa equals any of the twenty naturally occurring L-amino acids
TDCFKESKVDLQSQQKPLRKTPHTLCGFCTGFLTCGFSHSAFTFXIESHISQSNINGTLVPPAALISILQKGLQYVEAEISINEDGTVFDGRPIESLSLIDAVMPDVVQTRQQAFREKLAQQQASAAAAAAAATAAATAATTTSAGVSHQNPSKNREATVNGEENRAHSVNNHAKPMEIDGEVEIPSSKATVLRGHESEVFICAWNPVSDLLASGSGDSTARIWNLNENSNGGSTQLVLRHCIREGGHDVPSNKDVTSLDWNTNGTLLATGSYDGFARIWTEDGNLASTLGQHKGPIFALKWNRKGNYILSAGVDKTTIIWDAHTGEAKQQFPFHSAPALDVDWQNNTTFASCSTDMCIHVCRLGCDRPVKTFQGHTNEVNAIKWDPSGMLLASCSDDMTLKIWSMKQEVCIHDLQAHNKEIYTIKWSPTGPATSNPNSNIMLASASFDSTVRLWDIERGVCTHTLTKHQEPVYSVAFSPDGKYLASGSFDKCVHIWNTQSGNLVHSYRGTGGIFEVCWNARGDKVGASASDGSVCVLDLRK

SEQ ID NO: 2893 - protein, 789 aa, Homo sapiens
  MISC_FEATURE (166): Xaa equals any of the twenty naturally occurring L-amino acids
  MISC_FEATURE (202): Xaa equals any of the twenty naturally occurring L-amino acids
  MISC_FEATURE (203): Xaa equals any of the twenty naturally occurring L-amino acids
  MISC_FEATURE (333): Xaa equals any of the twenty naturally occurring L-amino acids
  MISC_FEATURE (657): Xaa equals any of the twenty naturally occurring L-amino acids
  MISC_FEATURE (658): Xaa equals any of the twenty naturally occurring L-amino acids
VKTDMEKLTFYAVSAPEKLDRIGSYLAERLSRDVVRHRSGYVLIAMEALDQLLMACHSQSIKPFVESFLHMVAKLLESGEPKLQVLGTNSFVKFANIEEDTPSYHRRYDFFVSRFSAMCHSCHSDPEIRTEIRIAGIRGIQGVVRKTVNDELRATIWEPQHMDKIXPSLLFNMQKIEEVDSRIGPPSSPSATDKEENPAVLXXNCFRELLGRATFGNMNNAVRPVFAHLDHHKLWDPNEFAVHCFKIIMYSIQAQYSHHVIQEILGHLDARKKDAPRVRAGIIQVLLEAVAIAAKGSIGPTVLEVFNTLLKHLRLSVEFEANDLQGGSVGSVXLNTSSKDNDEKIVQNAIIQTIGFFGSNLPDYQRSEIMMFIMGKVPVFGTSTHTLDISQLGDLGTRRIQIMLLRSLLMVTSGYKAKTIVTALPGSFLDPLLSPSLMEDYELRQLVLEVMHNLMDRHDNRAKLRGIRIIPDVADLKIKREKICRQDTSFMKKNGQQLYRHIYLGCKEEDNVQKNYELLYTSLALITIELANEEVVIDLIRLAIALQDSAIINEDNLPMFHRCGIMALVAAYLNFVSQMIAVPAFCQHVSKVIEIRTMEAPYFLPEHIFRDKCMLPKSLEKHEKDLYFLTNKIAESLGGSGYSVERLSVPYVPQVTXXDRLSRRKSIVDTVSIQVDILSNNVPSDDVVSNTEEITFEALKKAIDTSGMEEQEKEKRRLVIEKFQKAPFEEIAAQCESKANLLHDRLAQILELTIRPPPSPSGTLTITSGHAQYQSVPVYEMKFPDLCVY

SEQ ID NO: 2894 - protein, 168 aa, Homo sapiens
  MISC_FEATURE (147): Xaa equals any of the twenty naturally occurring L-amino acids
  MISC_FEATURE (149): Xaa equals any of the twenty naturally occurring L-amino acids
  MISC_FEATURE (150): Xaa equals any of the twenty naturally occurring L-amino acids
  MISC_FEATURE (154): Xaa equals any of the twenty naturally occurring L-amino acids
  MISC_FEATURE (159): Xaa equals any of the twenty naturally occurring L-amino acids
  MISC_FEATURE (160): Xaa equals any of the twenty naturally occurring L-amino acids
GQAGREEEREGRGESRTDGLARPRMQLPRWWELGDPCAWTGQGRGTRRMSPATTGTFLLTVYSIFSKVHSDRNVYPSAGVLFVHVLEREYFKGEFPPYPKPGEISNDPITFNTNLMGYPDRPGWLRYIQRTPYSDGVLYGSPTAENXGXXQSLXNCLQXXPFETARHN

SEQ ID NO: 2895 - protein, 272 aa, Homo sapiens
  MISC_FEATURE (153): Xaa equals any of the twenty naturally occurring L-amino acids
  MISC_FEATURE (179): Xaa equals any of the twenty naturally occurring L-amino acids
AASVKKHCFLLIRHVQASQRAIALIAEMIHTASLVHDDVIDDASSRRGKHTVNKIWGEKKAVLAGDLILSAASIALARIGNTTVISILTQVIEDLVRGEFLQLGSKENENERFAHYLEKTFKKTASLIANSCKAVSVLGCPDPVVHEIAYQYXKNVGIAFQLIDDVLDFTSCSDQMGKXTSADLKLGLATGPVLFACQQFPEMNAMIMRRFSLPGDVDRARQYVLQSDGVQQTTYLAQQYCHEAIREISKLRPSPERDALIQLSEIVLTRDK

SEQ ID NO: 2896 - protein, 121 aa, Homo sapiens
SPVWTEKRKMQDTGSVVPLHWFGFGYAALVASGGIIGYVKAGSVPSLAAGLLFGSLAGLGAYQLSQDPRNVWVFLATSGTLAGIMGMRFYHSGKFMPAGLIAGASLLMVAKVGVSMFNRPH

SEQ ID NO: 2897 - protein, 57 aa, Homo sapiens
KLIDTVDLVPREFDRRFSPHFLDWAAFGVMTLPSIGIPLLLWYSSKRKYDTPKTKKN

SEQ ID NO: 2898 - protein, 97 aa, Homo sapiens
  MISC_FEATURE (4): Xaa equals any of the twenty naturally occurring L-amino acids
  MISC_FEATURE (86): Xaa equals any of the twenty naturally occurring L-amino acids
AGPXRRLWCLTALGTLGPQRCSGARCHRPLSRQLCASQRSMRTLEDSSGTVLHRLIQEQLRYGNLTETRTLLAIQQQALRGGAGTXGTGSPQASLEI

SEQ ID NO: 2899 - protein, 235 aa, Homo sapiens
IAGEMSFSSRPVPEILKTSHLLCWETRLTSKTDKWPQSGHRPGATAKTTFPTLRPVPRRPSTWSRRSRRLHGMHLSRKRRWSCTTNFLNLSNWTRMTGPRPRQKAAVAEGAVRVEHRVLHKPRTHVGLQHNSPLLFQTKHTLISHIQLPKENPIKHSYTPHISHTHTHTHTHTHRSDVIKLQPLPVMAPWGLPAHPHEPASMAAGQASGGSHSDMELALEAYSFCSLERERTVYS

SEQ ID NO: 2900 - protein, 180 aa, Homo sapiens
QQPPPERPAHQFARPPAPFTMQPASAKWYDRRDYVFIEFCVEDSKDVNVNFEKSKLTFSCLGGSDNFKHLNEIDLFHCIDPNDSKHKRTDRSILCCLRKGESGQSWPRLTKERAKLNWLSVDFNNWKDWEDDSDEDMSNFDRFSEMMNNMGGDEDVDLPEVDGADDDSQDSDDEKMPDLE

SEQ ID NO: 2901 - protein, 222 aa, Homo sapiens
RMFHGIPATPGIGAPGNKPELYEEVKLYKNAREREKYDNMAELFAVVKTMQALEKAYIKDCVSPSEYTAACSRLLVQYKAAFRQVQGSEISSIDEFCRKFRLDCPLAMERIKEDRPITIKDDKGNLNRCIADVVSLFITVMDKLRLEIRAMDEIQPDLRELMETMHRMSHLPPDFEGRQTVSQWLQTLSGMSASDELDDSQVRQMLFDLESAYNAFNRFLHA

SEQ ID NO: 2902 - protein, 198 aa, Homo sapiens
KASKELQSVEQEVRWRMRKLKYKHLAFLAESCATLSQEQHSQELLAELLTHLERRWTEIEDSHTLVTVMMKVGHLSEPLMNRLEDKCLELVEHFGPNELRKVLVMLAAQSRRSVPLLRAISYHLVQKPFSLTKDVLLDVAYAYGKLSFHQTQVSQRLATDLLSLMPSLTSGEVAHCAKSFALLKWLSLPLFEAFASTS

SEQ ID NO: 2903 - protein, 246 aa, Homo sapiens
VGRASGCHLQRAPAAEPPSESRGRTQRGAAPLAPAAAMKAVVQRVTRASVTVGGEQISAIGRGICVLLGISLEDTQKELEHMVRKILNLRVFEDESGKHWSKSVMDKQYEILCVSQFTLQCVLKGNKPDFHLAMPTEQAEGFYNSFLEQLRKTYRPELIKDGKFGAYMQVHIQNDGPVTIELESPAPGTATSDPKQLSKLEKQQQRKEKTRAKGPSESSKERNTPRKEDRSASSGAEGDVSSEREP

SEQ ID NO: 2904 - protein, 189 aa, Homo sapiens
  MISC_FEATURE (174): Xaa equals any of the twenty naturally occurring L-amino acids
  MISC_FEATURE (176): Xaa equals any of the twenty naturally occurring L-amino acids
  MISC_FEATURE (184): Xaa equals any of the twenty naturally occurring L-amino acids
QEAIMTEQEKTSAVVEETREAVDTTSQPVATEKKSKNNTALILSAVAIAIALAAGIGLYGWGKQQAVNQTATSDALANQLTALQKAQESQKAELEGIIKQQAAQLKQANRQQETLAKQLDEVQQKVATISGSDAKTWLLAQADFLVKLAGRKLWSDQDVTTAAALLKSADASLXDXNDPSLIPXVGNYR

SEQ ID NO: 2905 - protein, 338 aa, Homo sapiens
PTLSGVGCCSLLRAQGSRGFSGAGWRPRQAAAMNFSEVFKLSSLLCKFSPDGKYLASCVQYRLVVRDVNTLQILQLYTCLDQIQHIEWSADSLFILCAMYKRGLVQVWSLEQPEWHCKIDEGSAGLVASCWSPDGRHILNTTEFHLRITVWSLCTKSVSYIKYPKACLQGITFTRDGRYMALAERRDCKDYVSIFVCSDWQLLRHFDTDTQDLTGIEWAPNGCVLAVWDTCLEYKILLYSLDGRLLSTYSAYEWSLGIKSVAWSPSSQFLAVGSYDGKVRILNHVTWKMITEFGHPAAINDPKIVVYKEAEKSPQLGLGCLSFPPPRAGAGPAPELRE

SEQ ID NO: 2906 - protein, 144 aa, Homo sapiens
GAHCSLGVFGVRMALEGMSKRKRKRSVQEGENPDDGVRGSPPEDYRLGQVASSLFRGEHHSRGGTGRLASLFSSLEPQIQPVYVPVPKQTIKKTKRNEEEESTSQIERPLSQEPAKKVKAKKKHTNAEKKLADRWSLDATPRLQ

SEQ ID NO: 2907 - protein, 572 aa, Homo sapiens
SKMSRLEAKKPSLCKSEPLTTERVRTTLSVLKRIVTSCYGPSGRLKQLHNGFGGYVCTTSQSSALLSHLLVTHPILKILTASIQNHVSSFSDCGLFTAILCCNLIENVQRLGLTPTTVIRLNKHLLSLCISYLKSETCGCRIPVDFSSTQILLCLVRSILTSKPACMLTRKETEHVSALILRAFLLTIPENAEGHIILGKSLIVPLKGQRVIDSTVLPGILIEMSEVQLMRLLPIKKSTALKVALFCTTLSGDTSDTGEGTVVVSYGVSLENAVLDQLLNLGRQLISDHVDLVLCQKVIHPSLKQFLNMHRIIAIDRIGVTLMEPLTKMTGTQPIGSLGSICPNSYGSVKDVCTAKFGSKHFFHLIPNEATICSLLLCNRNDTAWDELKLTCQTALHVLQLTLKEPWALLGGGCTETHLAAYIRHKTHNDPESILKDDECTQTELQLIAEAFCSALESVVGSLEHDGGEILTDMKYGHLWSVQADSPCVANWPDLLSQCGCGLYNSQEELNWSFLRSTRRPFVPQSCLPHEAVGSASNLTLDCLTAKLSGLQVAVETANLILDLSYVIEDKN

SEQ ID NO: 2908 - protein, 148 aa, Homo sapiens
RPTRPRYSAHIAIAVPRQWEEMRPLDIVELAEPEEVEVLEPEEDFEQFLLPVINEMREDIASLTREHGRAYLRNRSKLWEMDNMLIQIKTQVEASEESALNHLQNPGDAAEGRAAKRCEKAEEKAKEIAKMAEMLVELVRRIEKSESS

SEQ ID NO: 2909 - protein, 73 aa, Homo sapiens
  MISC_FEATURE (65): Xaa equals any of the twenty naturally occurring L-amino acids
EEEEEEELVDPLTTVREQCEQLEKCVKARERLEMCDQRVSSRSQTEEDCTEELFDFLHAKGPLRXPQTLQQLE

SEQ ID NO: 2910 - protein, 103 aa, Homo sapiens
  MISC_FEATURE (37): Xaa equals any of the twenty naturally occurring L-amino acids
  MISC_FEATURE (69): Xaa equals any of the twenty naturally occurring L-amino acids
APQTEPLAQSASLIPSVSNGSWKFQSLTLTGKGHHLXFSPQSQNGRAPPPLSFSSSPPSPASSVSLNQXAKGTRTIHTPSLTSYKAQNGSSSKATPSTAKETS

SEQ ID NO: 2911 - protein, 91 aa, Homo sapiens
KGVVLLGPTVFPRSRSPRKPIDSLRDSRSLSYSPVERRRPSPQPSPRDQQSSSSERGSRRGQRGDSRSPSHKRRRETPSPRPMRHRSSRSP

SEQ ID NO: 2912 - protein, 133 aa, Homo sapiens
  MISC_FEATURE (49): Xaa equals any of the twenty naturally occurring L-amino acids
  MISC_FEATURE (127): Xaa equals any of the twenty naturally occurring L-amino acids
  MISC_FEATURE (131): Xaa equals any of the twenty naturally occurring L-amino acids
LRRFSCQGRSRLPVEAPDQAPSASPSGSMCCRRRRRRPCVLRSLLPGPXSAQPASMSGIKKQKTENQQKSTNVVYQAHHVSRNKRGQVVGTRGGFRGCTVWLTGLSGAGKNNDNFALEELLVSHAIXVNSXMG

SEQ ID NO: 2913 - protein, 245 aa, Homo sapiens
  MISC_FEATURE (137): Xaa equals any of the twenty naturally occurring L-amino acids
ARMSFGPSPVSGGECSPPLTVEPPVRPLSATLNRRDMPRSEFGSVDGPLPHPRWSAEASGKPSPSDPGSGTATMMNSSSRGSSPTRVLDEGKVNMAPKGPPPFPGVPLMSTPMGGPVPPPIRYGPPPQLCGPFGPRXLPPPFGPGMRPPLGLREFAPGVPPGRRDLPLHPRGFLPGHAPFRPLGSLGPREYFIPGTRLPPPTHGPQEYPPPPAVRDLLPSGSRDEPPPASQSTSQDCSQALKQSP

SEQ ID NO: 2914 - protein, 177 aa, Homo sapiens
IRRRRPTPAMLFRLSEHSSPEEEASPHQRASGEGHHLKSKRPNPCAYTPPSLKAVQRIAESHLQSISNLNENQASEEEDELGELRELGYPREEDEEEEEDDEEEEEEEDSQAEVLKVIRQSAGQKTTCGQGLEGPWERPPPLDESERDGGSEDQVEDPALSEPGEEPQRPSPSEPGT

SEQ ID NO: 2915 - protein, 432 aa, Homo sapiens
  MISC_FEATURE (4): Xaa equals any of the twenty naturally occurring L-amino acids
PGPXAAPDGHLPEAVRGLRLACHHRGWTQRGGAVQGLWQAKHQPTAIIAKTFKGRGITGVEDKESWHGKPLPKNMAEQIIQEIYSQIQSKKKILATPPQEDAPSVDIANIRMPSLPSYKVGDKIATRKAYGQALAKLGHASDRIIALDGDTKNSTFSEIFKKEHPDRFIECYIAEQNMVSIAVGCATRNRTVPFCSTFAAFFTRAFDQIRMAAISESNINLCGSHCGVSIGEDGPSQMALEDLAMFRSVPTSTVFYPSDGVATEKAVELAANTKGICFIRTSRPENAIIYNNNEDFQVGQAKVVLKSKDDQVTVIGAGVTLHEALAAAELLKKEKINIRVLDPFTIKPLDRKLILDSARATKGRILTVEDHYYEGGIGEAVSSAVVGEPGITVTHLAVNRVPRSGKPAELLKMFGIDRDAIAQAVRGLITKA

SEQ ID NO: 2916 - protein, 470 aa, Homo sapiens
RPRRAARMRAGPEPQALVGQKRGALRLLVPRLVLTVSAPAEVRRRVLRPVLSWMDRETRALADSHFRGLGVDVPGVGQAPGRVAFVSEPGAFSYADFVRGFLLPNLPCVFSSAFTQGWGSRRRWVTPAGRPDFDHLLRTYGDVVVPVANCGVQEYNSNPKEHMTLRDYITYWKEYIQAGYSSPRGCLYLKDWHLCRDFPVEDVFTLPVYFSSDWLNEFWDALDVDDYRFVYAGPAGSWSPFHADIFRSFSWSVNVCGRKKWLLFPPGQEEALRDRHGNLPYDVTSPALCDTHLHPRNQLAGPPLEITQEAGEMVFVPSGWHHQVHNLDDTISINHNWVNGFNLANMWRFLQQELCAVQEEVSEWRDSMPDWHHHCQVIMRSCSGINFEEFYHFLKVIAEKRLLVLREAAAEDGAGLGFEQAAFDVGRITEVLASLVAHPDFQRVDTSAFSPQPKELLQQLREAVDAAAAP

SEQ ID NO: 2917 - protein, 443 aa, Homo sapiens
  MISC_FEATURE (96): Xaa equals any of the twenty naturally occurring L-amino acids
RPTRPIIVYRLSVFIVFSAKLPKNINGTDPIQKYLTPQTATSITASIISFIIIMILNTIYEKVAIMITNFELPRTQTDYENSLTMKMFLFQFVNYXSSCFYIAFFKGKFVGYPGDPVYWLGKYRNEECDPGGCLLELTTQLTIIMGGKAIWNNIQEVLLPWIMNLIGRFHRVSGSEKITPRWEQDYHLQPMGKLGLFYEYLEMIIQFGFVTLFVASFPLAPLLALVNNILEIRVDAWKLTTQFRRLVPEKAQDIGAWQPIMQGIAILAVVTNAMIIAFTSDMIPRLVYYWSFSVPPYGDHTSYTMEGYINNTLSIFKVADFKNKSKGNPYSDLGNHTTCRYRDFRYPPGHPQEYKHNIYYWHVIAAKLAFIIVMEHVIYSVKFFISYAIPDVSKRTKSKIQREKYLTQKLLHENHLKDMTKNMGVIAERMIEAVDNNLRPKSE

SEQ ID NO: 2918 - protein, 277 aa, Homo sapiens
WRRESRVRAGRECALLRVAAEGARPPPAGMSYDRAITVFSPDGHLFQVEYAQEAVKKGSTAVGVRGRDIVVLGVEKKSVAKLQDERTVRKICALDDNVCMAFAGLTADARIVINRARVECQSHRLTVEDPVTVEYITRYIASLKQRYTQSNGRRPFGISALIVGFDFDGTPRLYQTDPSGTYHAWKANAIGRGAKSVREFLEKNYTDEAIETDDLTIKLVIKALLEVVQSGGKNIELAVMRRDQSLKILNPEEIEKYVAEIEKEKEENEKKKQKKAS

SEQ ID NO: 2919 - protein, 498 aa, Homo sapiens
  MISC_FEATURE (471): Xaa equals any of the twenty naturally occurring L-amino acids
  MISC_FEATURE (479): Xaa equals any of the twenty naturally occurring L-amino acids
  MISC_FEATURE (489): Xaa equals any of the twenty naturally occurring L-amino acids
FNKRDPSVCQKPQAVANPVGQADWKSGKVLAQSSVTLPSVTMKLWVSALLMAWFGVLSCVQAEFFTSIGHMTDLIYAEKELVQSLKEYILVEEAKLSKIKSWANKMEALTSKSAADAEGYLAHPVNAYKLVKRLNTDWPALEDLVLQDSAAGFIANLSVQRQFFPTDEDEIGAAKALMRLQDTYRLDPGTISRGELPGTKYQAMLSVDDCFGMGRSAYNEGDYYHTVLWMEQVLKQLDAGEEATTTKSQVLDYLSYAVFQLGDLHRALELTRRLLSLDPSHERAGGNLRYFEQLLEEEREKTLTNQTEAELATPEGIYERPVDYLPERDVYESLCRGEGVKLTPRRQKRLFCRYHHGNRAPQLLIAPFKEEDEWDSPHIVRYYDVMSDEEIERIKEIAKPKLARATVRDPKTGVLTVASYRVSKSSWLEEDDDPVVARVNRRMQHITGLTVKTAELLQVANYGVGGQYEPXFDFSRNDXRDTFKHLGTXNRVATFLNY

SEQ ID NO: 2920 - protein, 339 aa, Homo sapiens
  MISC_FEATURE (93): Xaa equals any of the twenty naturally occurring L-amino acids
RTGVTGVVAQVWMFGGGGVLSSGEQLQMPVKPERGLGPSDGWLVSSRRGSPGTVLGLPFWLLTPVLVSRSIRSMLLLTRSPTAWHRLSQLKPXVLPGTLGGQALHLRSWLLSRQGPAETGGQGQPQGPGLRTRLLITGLFGAGLGGAWLALRAEKERLQQQKRTEALRQAAVGQGDFHLLDHRGRARCKADFRGQWVLMYFGFTHCPDICPDELEKLVQVVRQLEAEPGLPPVQPVFITVDPERDDVEAMARYVQDFHPRLLGLTGSTKQVAQASHSYRVYYNAGPKDEDQDYIVDHSIAIYLLNPDGLFTDYYGRSRSAEQISDSVRRHMAAFRSVLS

SEQ ID NO: 2921 - protein, 236 aa, Homo sapiens
TTEGDAEADKMAAAAVQGGRSGGSGGCSGAGGASNCGTGSGRSGLLDKWKIDDKPVKIDKWDGSAVKNSLDDSAKKVLLEKYKYVENFGLIDGRLTICTISCFFAIVALIWDYMHPFPESKPVLALCVISYFVMMGILTIYTSYKEKSIFLVAHRKDPTGMDPDDIWQLSSSLKRFDDKYTLKLTFISGRTKQQREAEFTKSIAKFFDHSGTLVMDAYEPEISRLHDSLAIERKIK

SEQ ID NO: 2922 - protein, 113 aa, Homo sapiens
  MISC_FEATURE (2): Xaa equals any of the twenty naturally occurring L-amino acids
FXKKLPDVRCLFKVWLIIIGFIFLVRAFVCLFVCLFVCFWRGSLILSPRLECNGAILDYCNLCLPGSSNCHASASRVAGITGVCHHIRLIFCIFSRDGVSPCWPGCSRTPHLR

SEQ ID NO: 2923 - protein, 268 aa, Homo sapiens
  MISC_FEATURE (1): Xaa equals any of the twenty naturally occurring L-amino acids
  MISC_FEATURE (17): Xaa equals any of the twenty naturally occurring L-amino acids
XPSSLRDQKLELHRGGXRSRTSGSPGLQEFGTRGCPPANSPPSAPATPEPARAPERVMANAGLQLLGFILAFLGWIGAIVSTALPQWRIYSYAGDNIVTAQAMYEGLWMSCVSQSTGQIQCKVFDSLLNLSSTLQATRALMVVGILLGVIAIFVATVGMKCMKCLEDDEVQKMRMAVIGGAIFLLAGLAILVATAWYGNRIVQEFYDPMTPVNARYEFGQALFTGWAAASLCLLGGALLCCSCPRKTTSYPTPRPYPKPAPSSGKDYV

SEQ ID NO: 2924 - protein, 268 aa, Homo sapiens
RLLFRVRKRMISFSAPPLMLPFSFYFFVFPVARTARKRKPSPEPEGEVGPPKINGEAQPWLSTSTEGLKIPMTPTSSFVSPPPPTASPHSNRTTPPEAAQNGQSPMAALILVADNAGGSHASKDANQVHSTTRRNSNSPPSPSSMNQRRLGPREVGGQGAGNTGGLEPVHPASLPDSSLATSAPLCCTLCHERLEDTHFVQCPSVPSHKFCFPCSRQSIKQQGASGEVYCPSGEKCPLVGSNVPWAFMQGEIATILAGDVKVKKERDS

SEQ ID NO: 2925 - protein, 476 aa, Homo sapiens
RLTMATATEQWVLVEMVQALYEAPAYHLILEGILILWIIRLLFSKTYKLQERSDLTVKEKEELIEEWQPEPLVPPVPKDHPALNYNIVSGPPSHKTVVNGKECINFASFNFLGLLDNPRVKAAALASLKKYGVGTCGPRGFYGTFDVHLDLEDRLAKFMKTEEAIIYSYGFATIASAIPAYSKRGDIVFVDRAACFAIQKGLQASRSDIKLFKHNDMADLERLLKEQEIEDQKNPRKARVTRRFIVVEGLYMNTGTICPLPELVKLKYKYKARIFLEESLSFGVLGEHGRGVTEHYGINIDDIDLISANMENALASIGGFCCGRSFVIDHQRLSGQGYCFSASLPPLLAAAAIEALNIMEENPGIFAVLKEKCGQIHKALQGISGLKVVGESLSPAFHLQLEESTGSREQDVRLLQEIVDQCMNRSIALTQARYLEKEEKCLPPPSIRVVVTVEQTEEELERAASTIKEVAQAVLL

SEQ ID NO: 2926 - protein, 85 aa, Homo sapiens
PRYNQLLNFCLSLSSFLFLPTICHPCHYPVGPVVARWLSLHRVIFNKIYVFFQHAFHFHCISRWLKTRQVCPLDNREWEFQKYGH

SEQ ID NO: 2927 - protein, 337 aa, Homo sapiens
RPDLATMRALLARLLLCVLVVSDSKGSNELHQVPSNCDCLNGGTCVSNKYFSNIHWCNCPKKFGGQHCEIDKSKTCYEGNGHFYRGKASTDTMGRPCLPWNSATVLQQTYHAHRSDALQLGLGKHNYCRNPDNRRRPWCYVQVGLKPLVQECMVHDCADGKKPSSPPEELKFQCGQKTLRPRFKIIGGEFTTIENQPWFAAIYRRHRGGSVTYVCGGSLISPCWVISATHCFIDYPKKEDYIVYLGRSRLNSNTQGEMKFEVENLILHKDYSADTLAHHNDIALLKIRSKEGRCAQHPGLYRPSACPRCITIPSLAQAVRSLALEKRILPTISIRSS

SEQ ID NO: 2928 - protein, 223 aa, Homo sapiens
DTAMAGLSRGSARALLAALLASTLLALLVSPARGRGGRDHGDWDEASRLPPLPPREDAARVARFVTHVSDWGALATISTLEAVRGRPFADVLSLSDGPPGAGSGVPYFYLSPLQLSVSNLQENPYATLTMTLAQTNFCKKHGFDPQSPLCVHIMLSGTVTKVNETEMDIAKHSLFIRHPEMKTWPSSHNWFFAKLNITNIWVLDYFGGPKIVTPEEYYNVTVQ

SEQ ID NO: 2929 - protein, 395 aa, Homo sapiens
ARRAPEPRRTEATRSRAQSTPAVPGGLKNPATSAFFPLPLGVALRAPSLQPLRRRDPRARPPNRSCSRANMPITRMRMRPWLEMQINSNQIPGLIWINKEEMIFQIPWKHAAKHGWDINKDACLFRSWAIHTGRYKAGEKEPDPKTWKANFRCAMNSLPDIEEVKDQSRNKGSSAVRVYRMLPPLTKNQRKERKSKSSRDAKSKAKRKSCGDSSPDTFSDGLSSSTLPDDHSSYTVPGYMQDLEVEQALTPALSPCAVSSTLPDWHIPVEVVPDSTSDLYNFQVSPMPSTSEATTDEDEEGKLPEDIMKLLEQSEWQPTNVDGKGYLLNEPGVQPTSVYGDFSCKEEPEIDSPGGDIGLSLQRVFTDLKNMDATWLDSLLTPVRLPSIQAIPCAP

SEQ ID NO: 2930 - protein, 600 aa, Homo sapiens
DGIFSSVLSRDMDLIDILWRQDIDLGVSREVFDFSQRRKEYELEKQKKLEKERQEQLQKEQEKAFFAQLQLDEETGEFLPIQPAQHIQSETSGSANYSQVAHIPKSDALYFDDCMQLLAQTFPFVDDNEVSSATFQSLVPDIPGHIESPVFIATNQAQSPETSVAQVAPVDLDGMQQDIEQVWEELLSIPELQCLNIENDKLVETTMVPSPEAKLTEVDNYHFYSSIPSMEKEVGNCSPHFLNAFEDSFSSILSTEDPNQLTVNSLNSDATVNTDFGDEFYSAFIAEPSISNSMPSPATLSHSLSELLNGPIDVSDLSLCKAFNQNHPESTAEFNDSDSGISLNTSPSVASPEHSVESSSYGDTLLGLSDSEVEELDSAPGSVKQNGPKTPVHSSGDMVQPLSPSQGQSTHVHDAQCENTPEKELPVSPGHRKTPFTKDKHSSRLEAHLTRDELRAKALHIPFPVEKIINLPVVDFNEMMSKEQFNEAQLALIRDIRRRGKNKVAAQNCRKRKLENIVELEQDLDHLKDEKEKLLKEKGENDKSLHLLKKQLSTLYLEVFSMLRDEDGKPYSPSEYSLQQTRDGNVFLVPKSKKPDVKKN

SEQ ID NO: 2931 - protein, 406 aa, Homo sapiens
GSAAARYLSATWRNWISLPPAGLPATAGLRHSGSLMAATCEISNIFSNYFSAMYSSEDSTLASVPPAATFGADDLVLTLSNPQMSLEGTEKASWLGEQPQFWSKTQVLDWISYQVEKNKYDASAIDFSRCDMDGATLCNCALEELRLVFGPLGDQLHAQLRDLTSSSSDELSWIIELLEKDGMAFQEALDPGPFDQGSPFAQELLDDGQQASPYHPGSCGAGAPSPGSSDVSTAGTGASRSSHSSDSGGSDVDLDPTDGKLFPSDGFRDCKKGDPKHGKRKRGRPRKLSKEYWDCLEGKKSKHAPRGTHLWEFIRDILIHPELNEGLMKWENRHEGVFKFLRSEAVAQLWGQKKKNSNMTYEKLSRAMRYYYKREILERVDGRRLVYKFGKNSSGWKEEEVLQSRN

SEQ ID NO: 2932 - protein, 316 aa, Homo sapiens
QLVPCCPPTQRTVQKNAKYICLANKDCPVDKRRRNRCQFCRFQKCLAVGMVKEVVRTDSLKGRRGRLPSKPKQPPDASPANLLTSLVRAHLDSGPSTAKLDYSKFQELVLPHFGKEDAGDVQQFYDLLSGSLEVIRKWAEKIPGFAELSPADQDLLLESAFLELFILRLAYRSKPGEGKLIFCSGLVLHRLQCARGFGDWIDSILAFSRSLHSLLVDVPAFACLSALVLITDRHGLQEPRRVEELQNRIASCLKEHVAAVAGEPQPASCLSRLLGKLPELRTLCTQGLQRIFYLKLEDLVPPPPIIDKIFMDTLPF

SEQ ID NO: 2933 - protein, 406 aa, Homo sapiens
  MISC_FEATURE (82): Xaa equals any of the twenty naturally occurring L-amino acids
  MISC_FEATURE (95): Xaa equals any of the twenty naturally occurring L-amino acids
  MISC_FEATURE (96): Xaa equals any of the twenty naturally occurring L-amino acids
LQRLLPPGAERPAHLCTGPGGEDGAGGRVPGTRPQRPPALQRAEDGRQGGLRVAGTAGPPPGVPLRPGQGGSGHQEQGASHXGSLDQGLTGAKRXXGCPACGRRPRVLGESPVPHTVLNLKEPLYVGGAPDFSKLARAAAVSSGFDGAIQLVSLGGRQLLTPEHVLRQVDVTSFAGHPCTRASGHPCLNGASCVPREAAYVCLCPGGFSGPHCEKGLVEKSAGDVDTLAFDGRTFVEYLNAVTESEKALQSNHFELSLRTEATQGLVLWSGKATERADYVALAIVDGHLQLSYNLGSQPVVLRSTVPVNTNRWLRVVAHREQREGSLQVGNEAPVTGSSPLGATQLDTDGALWLGGLPELPVGPALPKAYGTGFVGCLRDVVVGRHPLHLLEDAVTKPELRPCPTP

SEQ ID NO: 2934 - protein, 185 aa, Homo sapiens
PRVRNNRQRTPLAMASNFKKANMASSSQRKRMSPKPELTEEQKQEIREAFDLFDADGTGTIDVKELKVAMRALGFEPKKEEIKKMISEIDKEGTGKMNFGDFLTVMTQKMSEKDTKEEILKAFKLFDDDETGKISFKNLKRVAKELGENLTDEELQEMIDEADRDGDGEVSEQEFLRIMKKTSLY

SEQ ID NO: 2935 - protein, 199 aa, Homo sapiens
  MISC_FEATURE (72): Xaa equals any of the twenty naturally occurring L-amino acids
AHASAHAFGRAPKREGDPPRSYGKVGPSSQSFPLWCPRLGRPVPRLLSSFRPSPSTRSLSLSPAAMEQPPAXKSKLKKLSEDSLTKQPEEVFDVLEKLGEGSYGSVFKAIHKESGQVVAIKQVPVESDLQEIIKEISIMQQCDSPYVVKYYGSYFKNTDLWIVMEYCGAGSVSDIIRLRNKTLIGDGIGNILKSTLEGL

SEQ ID NO: 2936 - protein, 186 aa, Homo sapiens
  MISC_FEATURE (168): Xaa equals any of the twenty naturally occurring L-amino acids
LLVARCGPLSNSIKSEAQGFTSSRKRSQLNLSSVLWKKLEKKDPSFKMAMVSEFLKQAWFIENEEQEYIKTVKGSKGGPGSAVSPYPSFNPSSDVAALHNAITVKGVDEATIIDILTKRNNAQRQQIKAAYLQEKGKPLDEALKKALSGHLEEVVLALLKTPAQFDAXELRAAMKGPWGLDGRHSG

SEQ ID NO: 2937 - protein, 91 aa, Homo sapiens
VGEGSAAMKVKIKCWNGVATWLWVANDENCGICRMAFNGCCPDCKVPGDDCPLVWGQCSHCFHMHCILKWLHAQQVQQHCPMCRQEWKFKE

SEQ ID NO: 2938 - protein, 199 aa, Homo sapiens
AEPRPGGTSLLGPVAAKELSFSRPNGRRGQLPRPPGSLTLLLFFSSPASRGPASLSPGGIRLLLPPPPHLLPGQPACPAAVMCDKEFMWALKNGDLDEVKDYVAKGEDVNRTLEGGRKPLHYAADCGQLEILEFLLLKGADINAPDKHHITPLLSAVYEGHVSCVKLLLSKGADKTVKGPDGLTAFEATDNQAIKALLQ

SEQ ID NO: 2939 - protein, 134 aa, Homo sapiens
GGAGHQSRVEMSYIPGQPVTAVVQRVEIHKLRQGENLILGFSIGGGIDQDPSQNPFSEDKTDKGIYVTRVSEGGPAEIAGLQIGDKIMQVNGWDMTMVTHDQARKRLTKRSEEVVRLLVTRQSLQKAVQQSMLS

SEQ ID NO: 2940 - protein, 140 aa, Homo sapiens
  MISC_FEATURE (30): Xaa equals any of the twenty naturally occurring L-amino acids
DHGSHLLCSARGHQQKHGERKSPGRLRRHXEAGEHNQRQGDRSSLKVVKAAAQVLNTLWQYRDLRSIYKKDGWNQNHFITPVSTLERDRFKSHPSLSTTNQQMSPIIQSGSSKPSPIYISSYSSPAREQNRRLQHQQLVL

SEQ ID NO: 2941 - protein, 66 aa, Homo sapiens
  MISC_FEATURE (19): Xaa equals any of the twenty naturally occurring L-amino acids
PSSNTTHYRESWVRLQVPXPEFPGRPTRPSLKSVSGPGVVAHACNPSTLGGRGGRITRSGDPDYPG

SEQ ID NO: 2942 - protein, 175 aa, Homo sapiens
HSGTRMATPMHRLIARRQAEANKQHVRCQKCLEFGHWTYECTGKRKYLHRPSRTAELKKALKEKENRLLLQQSIGETNVERKAKKKRSKSVTSSSSSSSDSSASDSSSESEETSTSSSSEDSDTDESSSSSSSSASSTTSSSSSDSDSDSSSSSSSSTSTDSSSDDEPPKKKKKK

SEQ ID NO: 2943 - protein, 138 aa, Homo sapiens
EAVAEVVLPRIEIFVIAVVSLVILPRIVIFRRMACYNCGRGGHIAKDCKEPKREREQCCYNCGKPGHLARDCDHADEQKCYSCGEFGHIQKDCTKVKCYRCGETGHVAINCSKTSEVNCYRCGESGHLARECTIEATA

SEQ ID NO: 2944 - protein, 448 aa, Homo sapiens
  MISC_FEATURE (2): Xaa equals any of the twenty naturally occurring L-amino acids
RXISLLRRCCCRHTRSPCLVMAENDVDNELLDYEDDEVETAAGGDGAEAPAKKDVKGSYVSIHSSGFRDFLLKPELLRAIVDCGFEHPSEVQHECIPQAILGMDVLCQAKSGMGKTAVFVLATLQQLEPVTGQVSVLVMCHTRELAFQISKEYERFSKYMPNVKVAVFFGGLSIKKDEEVLKKNCPHIVVGTPGRILALARNKSLNLKHIKHFILDECDKMLEQLDMRRDVQEIFRMTPHEKQVMMFSATLSKEIRPVCRKFMQDPMEIFVDDETKLTLHGLQQYYVKLKDNEKNRKLFDLLDVLEFNQVVIFVKSVQRCIALAQLLVEQNFPAIAIHRGMPQEERLSRYQQFKDFQRRILVATNLFGRGMDIERVNIAFNYDMPEDSDTYLHRVARAGRFGTKGLAITFVSDENDAKILNDVQDRFEVNISELPDEIDISSYIEQTR

SEQ ID NO: 2945 - protein, 331 aa, Homo sapiens
EFAQLIKRQQQQRQQQQQQQQQQEYQELFRHMNQGDAGSLAPSLGGQSMTERQALSYQNADSYHHHTSPQHLLQIRAQECVSQASSPTPPHGYAHQPALMHSESMEEDCSCEGAKDGFQDSKSSSTLTKGCHDSPLLLSTGGPGDPESLLGTVSHAQELGIHPYGHQPTAAFSKNKVPSREPVIGNCMDRSSPGQAVELPDHNGLGYPARPSVHEHHRPRALQRHHTIQNSDDAYVQLDNLPGMSLVAGKALSSARMSDAVLSQSSLMGSQQFQDGENEECGASLGGHEHPDLSDGSQHLNSSCYPSTCITDILLSYKHPEVSFSMEQAGV

SEQ ID NO: 2946 - protein, 676 aa, Homo sapiens
PIQCQISQYLQGPATSAATLTKNLGLPACATANIRRGVFMSSDIKIKVQSFGRFLSNMVMPNIGAFIAWGIITALFIPTGWLPNETLAKLVGPMITYLLPLLIGYTGGKLVGGERGGVVGAITTMGVIVGADMPMFLGSMIAGPLGGWCIKHFDRWVDGKIKSGFEMLVNNFSAGIIGMILAILAFLGIGPIVEALSKMLAAGVNFMVVHDMLPLASIFVEPAKILFLNNAINHGIFSPLGIQQSHELGKSIFFLIEANPGPGMGVLLAYMFFGRGSAKQSAGGAAIIHFLGGIHEIYFPYVLMNPRLILAVILGGMTGVFTLTILGGGLVSPASPGSILAVLAMTPKGAYFANIAGVCAAMAVSFVVSAILLKTSKVKEEDDIEAATRRMQDMKAESKGASPLSAGDVTNDLSHVRKIIVACDAGMGSSAMGAGVLRKKIQDAGLSQISVTNSAINNLPPDVDLVITHRDLTERAMRQVPQAQHISLTNFLDSGLYTSLTERLVAAQRHTANEEKVKDSLKDSFDDSSANLFKLGAENIFLGRKAATKEEAIRFAGEQLVKGGYVEPEYVQAMLDREKLTPTYLGESIAVPHGTVEAKDRVLKTGVVFCQYPEGVRFGEEEDDIARLVIGIAARNNEHIQVITSLTNALDDESVIERLAHTTSVDEVLELLAGRK

SEQ ID NO: 2947 - protein, 198 aa, Homo sapiens
SQQPRIMSKLGRAARGLRKPEVGGVIRAIVRAGLAMPGPPLGPVLGQRGVSINQFCKEFNERTKDIKEGIPLPTKILVKPDRTFEIKIGQPTVSYFLKAAAGIEKGARQTGKEVAGLVTLKHVYEIARIKAQDEAFALQDVPLSSVVRSIIGSARSLGIRVVKDLSSEELAAFQKERAIFLAAQKEADLAAQEEAAKK

SEQ ID NO: 2948 - protein, 322 aa, Homo sapiens
  MISC_FEATURE (5): Xaa equals any of the twenty naturally occurring L-amino acids
  MISC_FEATURE (179): Xaa equals any of the twenty naturally occurring L-amino acids
  MISC_FEATURE (182): Xaa equals any of the twenty naturally occurring L-amino acids
  MISC_FEATURE (196): Xaa equals any of the twenty naturally occurring L-amino acids
  MISC_FEATURE (223): Xaa equals any of the twenty naturally occurring L-amino acids
  MISC_FEATURE (241): Xaa equals any of the twenty naturally occurring L-amino acids
  MISC_FEATURE (242): Xaa equals any of the twenty naturally occurring L-amino acids
  MISC_FEATURE (243): Xaa equals any of the twenty naturally occurring L-amino acids
  MISC_FEATURE (252): Xaa equals any of the twenty naturally occurring L-amino acids
  MISC_FEATURE (308): Xaa equals any of the twenty naturally occurring L-amino acids
DPRVXASMEAVVSLLAGLPLQPEEGDGVELMEAKSQLFLKYFTLFMNLLNDCSEVEDESAQTGGRKRGMSRRLASLRHCTVLAMSNLLNANVDSGLMHSIGLGYHKDLQTRATFMEVLTKILQQGTEFDTLAETVLADRFERLVELVTMMGDQGELPIAMALANVVPWSQWDELARVLXTLXDSRHLLYQLLWNMXSKEVELADSMQTLFRGNSLASKIMTFXFKVYGATYLQKLLDPLLXXXITSSDWQHXSFEVDPTRLEPSESLEENQRNLLQMTEKFFHAIISSSSEFPPQLRSVCHCLYQATXHSLLNKATVKKKKK

SEQ ID NO: 2949 - protein, 194 aa, Homo sapiens
IRHEQSSEPPTAAAMLCLLLTLGVALVCGVPAMDIPQTKQDLELPKLAGTWHSMAMATNNISLMATLKAPLRVHITSLLPTPEDNLEIVLHRWENNSCVEKKVLGEKTENPKKFKINYTVANEATLLDTDYDNFLFLCLQDTTTPIQSMMCQYLARVLVEDDEIMQGFIRAFRPLPRHLWYLLDLKQMEEPCRF

SEQ ID NO: 2950 - protein, 230 aa, Homo sapiens
KMTTAARPTFEPARGGRGKGEGDLSQLSKQYSSRDLPSHTKIKYRQTTQDAPEEVRNRDFRRELEERERAAAREKNRDRPTREHTTSSSVSKKPRLDQIPAANLDADDPLTDEEDEDFEEESDDDDTAALLAELEKIKKERAEEQARKEQEQKAEEERIRMENILSGNPLLNLTGPSQPQANFKVKRRWDDDVVFKNCAKGVDDQKKDKRFVNDTLRSEFHKKFMEKYIK

SEQ ID NO: 2951 - protein, 217 aa, Homo sapiens
ARRRQKGAQGEGGCGAVCSMAYPGHPGAGGGYYPGGYGGAPGGPAFPGQTQDPLYGYFAAVAGQDGQIDADELQRCLTQSGIAGGYKPFNLETCRLMVSMLDRDMSGTMGFNEFKELWAVLNGWRQHFISFDTDRSGTVDPQELQKALTTMGFRLSPQAVNSIAKRYSTNGKITFDDYIACCVKLRALTDSFRRRDTAQQGVVNFPYDDFIQCVMSV

SEQ ID NO: 2952 - protein, 210 aa, Homo sapiens
TMASMGLQVMGIALAVLGWLAVMLCCALPMWRVTAFIGSNIVTSQTIWEGLWMNCVVQSTGQMQCKVYDSLLALPQDLQAARALVIISIIVAALGVLLSVVGGKCTNCLEDESAKAKTMIVAGVVFLLAGLMVIVPVSWTAHNIIQDFYNPLVASGQKREMGASLYVGWAASGLLLLGGGLLCCNCPPRTDKPYSAKYSAARSAAASNYV

SEQ ID NO: 2953 - protein, 239 aa, Homo sapiens
  MISC_FEATURE (28): Xaa equals any of the twenty naturally occurring L-amino acids
SLALDVVGLNAMQLQNLAALAAAASHSXTHQVVPMLSLHPAVPSACSLVQRSSPSSSSSNSVNPIASLGALQTLAGATAGLNVGSLAGMAALNGGLGSSGLSNGTGSTMEALTQAYSGIQQYAAAALPTLYNQNLLTQQSIGAAGSQKEGPEGANLFIYHLPQEFGDQDLLQMFMPFGNVVSAKVFIDKQTNLSKCFGFVSYDNPVSAQAAIQSMNGFQIGMKRLKVQLKRSKNDSKPY

SEQ ID NO: 2954 - protein, 141 aa, Homo sapiens
RAGVGDGGASCPSWGQRAQDHRLEHPTWPLGKNPTDEYLEGMMSEAPGPINFTMFLTMFGEKLNGTDPEDVIRNAFACFDEEASGFIHEDHLRELLTTMGDRFTDEEVDEMYREAPIDKKGNFNYVEFTRILKHGAKDKDD

SEQ ID NO: 2955 - protein, 137 aa, Homo sapiens
PRVWGWDLGRNRLYHDGKNQPSKTYPAFLEPDETFIVPDSFLVALDMDDGTLSFIVDGQYMGVAFRGLKGKKLYPVVSAVWGHCEIRMRYLNGLDPEPLPLMDLCRRSVRLALGRERLGEIHTLPLPASLKAYLLYQ

SEQ ID NO: 2956 - protein, 104 aa, Homo sapiens
LAGSAMEPEQMLEGQTQVAENPHSEYGLTDNVERIVENEKINAEKSSKQKVDLQSLPTRAYLDQTVVPILLQGLAVLAKERPPNPIEFLASYLLKNKAQFEDRN

SEQ ID NO: 2957 - protein, 187 aa, Homo sapiens
  MISC_FEATURE (2): Xaa equals any of the twenty naturally occurring L-amino acids
  MISC_FEATURE (16): Xaa equals any of the twenty naturally occurring L-amino acids
  MISC_FEATURE (18): Xaa equals any of the twenty naturally occurring L-amino acids
  MISC_FEATURE (182): Xaa equals any of the twenty naturally occurring L-amino acids
LXVPCLYIIDAIFNSXPXSSQSRFCIVLQIFLRLFGVFASSIVLILSQRSLFKFYTYSSAFLLAATSVLVNYYASLHIDFYGAYNTSAFGIELLPRKGPSLWMALIVLQLTFGIGYVTLLQIHSIYSQLIILDLLVPVIGLITELPLHIRETLLFTSSLILTLNTVFVLAVKLKVVLLFHTXCLSFG

SEQ ID NO: 2958 - protein, 71 aa, Homo sapiens
LKIFFFFPSGGDMSKNVSQSQMAKLNQQMAKMMDPRVLHHMGGMAGLQSMMRQFQQGAAGNMKGMMGFNNM

SEQ ID NO: 2959 - protein, 360 aa, Homo sapiens
AARPTRHLCCGQQGQVLVCGPSAVGRLPLQWGLGLGPTMSSLGGGSQDAGGSSSSSTNGSGGSGSSGPKAGAADKSAVVAAAAPASVADDTPPPERRNKSGIISEPLNKSLRRSRPLSHYSSFGSSGGSGGGSMMGGESADKATAAAAAASLLANGHDLAAAMAVDKSNPTSKHKSGAVASLLSKAERATELAAEGQLTLQQFAQSTEMLKRVVQEHLPLMSEAGAGLPDMEAVAGAEALNGQSDFPYLGAFPINPGLFIMTPAGVFLAESALHMAGLAEYPMQGELASAISSGKKKRKRCGMCAPCRRRINCEQCSSCRNRKTGHQICKFRKCEELKKKPSAALEKVMLPTGAAFRWFQ

SEQ ID NO: 2960 - protein, 305 aa, Homo sapiens
LPGTGGVRGHLQEPHPQAGHPGDTVLPLAGPQVGVLQGQCWEDFVGQELYRFLVMDFVLMLLDTLFGELVWRIISEKKLKRRRKPEFDIARNVLELIYGQTLTWLGVLFSPLLPAVQIIKLLLVFYVKKTSLLANCQAPRRPWLASHMSTVFLTLLCFPAFLGAAVFLCYAVWQVKPSSTCGPFRTLDTMYEAGRVWVRHLEAAGPRVSWLPWVHRYLMENTFFVFLVSALLLAVIYLNIQVVRGQRKVICLLKEQISNEGEDKIFLINKLHSIYERKEREERSRVGTTEEAAAPPALLTDEQDA

SEQ ID NO: 2961 - protein, 195 aa, Homo sapiens
GRLLLLKARPRRPYGCRVIQRILEHCLPDQTLPILEELHQHTEQLVQDQYGNYVIQHVLEHGRPEDKSKIVAEIRGNVLVLSQHKFASNVVEKCVTHASRTERAVLIDEVCTMNDGPHSALYTMMKDQYANYVVQKMIDVAEPGQRKIVMHKIRPHIATLRKYTYGKHILAKLEKYYMKNGVDLGPICGPPNGII

SEQ ID NO: 2962 - protein, 203 aa, Homo sapiens
  MISC_FEATURE (8): Xaa equals any of the twenty naturally occurring L-amino acids
PTRRPRVXEARVVVVRCLPACVRDLPDSVAAMASDEGKLFVGGLSFDTNEQSLEQVFSKYGQISEVVVVKDRETQRSRGFGFVTFENIDDAKDAMMAMNGKSVDGRQIRVDQAGKSSDNRSRGYRGGSAGGRGFFRGGRGRGRGFSRGGGDRGYGGNRFESRSGGYGGSRDYYSSRSQSGGYSDRSSGGSYRDSYDSYATHNE

SEQ ID NO: 2963 - protein, 64 aa, Homo sapiens
SRAAGFMGLLRIMMPPKLQLLAVVAFAVAMLFLENQIQKLEESRSKLERAIARHESEKLNTTYN

SEQ ID NO: 2964 - protein, 89 aa, Homo sapiens
KNVCPCMCVLGVDMTLEIIVFVFPLPGDKEPCAHPNSRFCAPARQCPIMDPAWEAPEGVPIDAIIFGGRRPKGKQHMSSMFLAKGLSLY

SEQ ID NO: 2965 - protein, 232 aa, Homo sapiens
EGGRQPRRGPGGGLGAGQGAAPAGGLGAGGGVTRTAVLSDTTPACLFVAMRAAYLFLLFLPAGLLAQGQYDLDPLPPFPDHVQYTHYSDQIDNPDYYDYQEVTPRPSEEQFQFQSQQQVQQEVIPAPTPEPGNAELEPTEPGPLDCREEQYPCTRLYSIHRPCKQCLNEVCFYSLRRVYVINKEICVRTVCAHEELLRADLCRDKFSKCGVMASSGLCQSVAASCARSCGSC

SEQ ID NO: 2966 - protein, 269 aa, Homo sapiens
  MISC_FEATURE (2): Xaa equals any of the twenty naturally occurring L-amino acids
QXWIPRDCRNSARAHFACRGRVRGLRCSGRRRSLEVATSLPHPSPGPRPAADVKMSSSEEVSWISWFCGLRGNEFFCEVDEDYIQDKFNLTGLNEQVPHYRQALDMILDLEPDEELEDNPNQSDLIEQAAEMLYGLIHARYILTNRGIAQMLEKYQQGDFGYCPRVYCENQPMLPIGLSDIPGEAMVKLYCPKCMDVYTPKSSRHHHTDGAYFGTGFPHMLFMVHPEYRPKRPANQFVPRLYGFKIHPMAYQLQLQAASNFKSPVKTIR

SEQ ID NO: 2967 - protein, 165 aa, Homo sapiens
YKQKKKVEDVPSRVVSVPNLASYAKNFLSGDLSSRINAPPITTSPSLDPSPSCGRTYKPNQSTDAKTATRFGGCWGQGPLFYFPVDKRGSRILSSTWYQIPEGLFSWMIRQGTLNHLPENFSMGYTKGGLHLAWRSEFKLQSSSFLALWPWTGHLTSPGLHIPCL

SEQ ID NO: 2968 - protein, 785 aa, Homo sapiens
  MISC_FEATURE (482): Xaa equals any of the twenty naturally occurring L-amino acids
  MISC_FEATURE (636): Xaa equals any of the twenty naturally occurring L-amino acids
  MISC_FEATURE (768): Xaa equals any of the twenty naturally occurring L-amino acids
  MISC_FEATURE (775): Xaa equals any of the twenty naturally occurring L-amino acids
  MISC_FEATURE (780): Xaa equals any of the twenty naturally occurring L-amino acids
  MISC_FEATURE (782): Xaa equals any of the twenty naturally occurring L-amino acids
TLTDAQTRVASPSQGQVGSSSPKRSGMTAVPQHLGPSLQRTVHDMEQFGQQQYDIYERMVPPRPDSLTGLRSSYASQHSQLGQDLRSAVSPDLHITPIYEGRTYYSPVYRSPNHGTVELQGSQTALYRTGSVGIGNLQRTSSQRSTLTYQRNNYALNTTATYAEPYRPIQYRVQECNYNRLQHAVPADDGTTRSPSIDSIQKDPREFAWRDPELPEVIHMLQHQFPSVQANAAAYLQHLCFGDNKVKMEVCRLGGIKHLVDLLDHRVLEVQKNACGALRNLVFGKSTDENKIAMKNVGGIPALLRLLRKSIDAEVRELVTGVLWNLSSCDAVKMTIIRDALSTLTNTVIVPHSGWNNSSFDDDHKIKFQTSLVLRNTTGCLRNLSSAGEEARKQMRSCEGLVDSLLYVIHTCVNTSDYDSKTVENCVCTLRNLSYRLELEVPQARLLGLNELDDLLGKESPSKDSEPSCWGKKKKKKKRTPXEDQWDGVGPIPGLSKSPKGVEMLWHPSVVKPYLTLLAESSNPATLEGSAGSLQNLSAGNWKFAAYIRAAVRKEKGLPILVELLRMDNDRVVSSVATALRNMALDVRNKELIGKYAMRDLVNRLPGGNGPSVLSDETMAAICCALHEVTSKNMEXAKALADSGGIEKLVNITKGRGDRSSLKVVKAAAQVLNTLWQYRDLRSIYKKDGWNQNHFITPVSTLERDRFKSHPSLSTTNQQMSPIIQSVGSTSSSPALLGIRDPRSEYDRTQPPMQYYNSQGDATHKGLXPGSSKPXPIYSXLXLPP

SEQ ID NO: 2969 - protein, 522 aa, Homo sapiens
  MISC_FEATURE (362): Xaa equals any of the twenty naturally occurring L-amino acids
SAAGTGPEPEPEPHRHLLNRPADRPPQSGPRASGRAQSPPGPSMARAAALLPSRSPPTPLLWPLLLLLLLETGAQDVRVQVLPEVRGQLGGTVELPCHLLPPVPGLYISLVTWQRPDAPANHQNVAAFHPKMGPSFPSPKPGSERLSFVSAKQSTGQDTEAELQDATLALHGLTVEDEGNYTCEFATFPKGSVRGMTWLRVIAKPKNQAEAQKVTFSQDPTTVALCISKEGRPPARISWLSSLDWEAKETQVSGTLAGTVTVTSRFTLVPSGRADGVTVTCKVEHESFEEPALIPVTLSVRYPPEVSISGYDDNWYLGRTDATLSCDVRSNPEPTGYDWSTTSGTFPTSAVAQGSQLVIHAXDSLFNTTFVCTVTNAVGMGRAEQVIFVRETPRASPRDVGPLVWGAVGGTLLVLLLLAGGSLAFILLRVRRRRKSPGGAGGGASGDGGFYDPKAQVLGNGDPVFWTPVVPGPMEPDGKDEEEEEEEEKAEKGLMLPPPPALEDDMESQLDGSLISRRAVYV

SEQ ID NO: 2970 - protein, 354 aa, Homo sapiens
  MISC_FEATURE (151): Xaa equals any of the twenty naturally occurring L-amino acids
QQERVASASAGSCDVPSPFNHRPGSHLDSHRRMAPTPIPTRSPSDSSTASTPVAEQIERALDEVTSSQPPPLPPPPPPAQETQEPSPILDSEETRAAAPQAWAGPMEEPPQAQAPPRGPGSPAEDLMFMESAEQAVLAAPVEPATADATEXHDAADTIETDTATADTTVANNVPPAATSLIDLWPGNGEGASTLQGEPRAPTPPSGTEVTLAEVPLLDEVAPEPLLPAGEGCATLLNFDELPEPPATFCDPEEVEGEPLAAPQTPTLPSALEELEQEQEPEPHLLTNGETTQKEGTQASEGYFSQSQEEEFAQSEELCAKAPPPVFYNKPPEIDITCWDADPVPEEEEGFEGGD

SEQ ID NO: 2971 - protein, 777 aa, Homo sapiens
  MISC_FEATURE (186): Xaa equals any of the twenty naturally occurring L-amino acids
IVNHSHNMSYKRLLLLPSIHLEALDLLSALILACGSRLLRFGILIGRLLPQVLNSWSIGRDSLSPGQERPYSTVRTKVYAILELWVQVCGASAGMLQGGASGEALLTHLLSDISPPADALKLRSPRGSPDGSLQTGKPSAPKKLKLDVGEAMAPPSHRKGDSNANSDVCAAALRGLSRTILMCGPXIKEETHRRLHDLVLPLVMGVQQGEVLGSSPYTSSRCRRELYCLLLALLLAPSPRCPPPLACALQAFSLGQREDSLEVSSFCSEALVTCAALTHPRVPPLQPMGPTCPTPAPVPPPEAPSPFRAPPFHPPGPMPSVGSMPSAGPMPSAGPMPSAGPVPSARPGPPTTANHLGLSVPGLVSVPPRLLPGPENHRAGSNEDPILAPSGTPPPTIPPDETFGGRVPRPAFVHYDKEEASDVEISLESDSDDSVVIVPEGLPPLPPPPPSGATPPPIAPTGPPTASPPVPAKEEPEELPAAPGPLPPPPPPPPPVPGPVTLPPPQLVPEGTPGGGGPPALEEDLTVININSSDEEEEEEEEEEEEEEEEEEEEEDFEEEEEDEEEYFEEEEEEEEEFEEEFEEEEGELEEEEEEEDEEEEEELEEVEDLEFGTAGGEVEEGAPPPPTLPPALPPPESPPKVQPEPEPEPGLLLEVEEPGTEEERGADTAPTLAPEALPSQGEVEREGESPAAGPPPQELVEEEPSAPPTLLEEETEDGSDKVQPPPETPAEEEMETETEAEALQEKEQDDTAAMLADFIDCPPDDEKPPPPTEPDS

SEQ ID NO: 2972 - protein, 258 aa, Homo sapiens
NRTAGNLFFFSSQRFDCYGGGLSKINTPLLTPLKLSLEEWSTKPTNDSYGLFAVVMHSGITISSGHYTASVKVTDLNSLELDKGNFVVDQMCEIGKPEPLNEEEARGVVENYNDEEVSIRVGGNTQPSKVLNKKNVEAIGLLGGQKSKADYELYNKASNPDKVASTAFAENRNSETSDTTGTHESDRNKESSDQTGINISGFENKISYVVQSLKEYEGKWLLFDDSEVKVTEEKDFLNSLSPSTSPTSTPYLLFYKKL

SEQ ID NO: 2973 - protein, 22 aa, Homo sapiens
FHFHSITLLILGLLTNTLTIYQ

SEQ ID NO: 2974 - protein, 291 aa, Homo sapiens
NNVATTHEPASVPAPQGDLLSGAEPEGGNGARRPPGAREQPQSPPPARGGAGSLATAAPPSSGLSCPGCFRLRLWMLRLSERNMKVLLAAALIAGSVFFLLLPGPSAADEKKKGPKVTVKVYFDLRIGDEDVGRVIFGLFGKTVPKTVDNFVALATGEKGFGYKNSKFHRVIKDFMIQGGDFTRGDGTGGKSIYGERFPDENFKLKHYGPGWVSMANAGKDTNGSQFFITTVKTAWLDGKHVVFGKVLEGMEVVRKVESTKTDSRDKPLKDVIIADCGKIEVEKPFAIAKE

SEQ ID NO: 2975 - protein, 45 aa, Homo sapiens
VDPRVRADQDGEKLQALLRLVIELLERVKIVEALLTTSTTAKQYI

SEQ ID NO: 2976 - protein, 306 aa, Homo sapiens
VEPTQPTPQLLLRQASKFPPAQFLAVSELSERQMLLGGESILRDSYMRKLPKAVVSAAQAGLLRQQEELDRKAAELERKERELQNTVANLHVRQNNWPPLPSWCPVKPCFYQDFSTEIPADYQRICKMLYYLWMLHSVTLFLNLLACLAWFSGNSSKGVDFGLSILWFLIFTPCAFLCWYRPIYKAFRSDNSFSFFVFFFVFFCQIGIYIIQLVGIPGLGDSGWIAALSTLDNHSLAISVIMMVVAGFFTLCAVLSVFLLQRVHSLYRRTGASFQQAQEEFSQGIFSSRTFHRAASSAAQGAFQGN

SEQ ID NO: 2977 - protein, 240 aa, Homo sapiens
  MISC_FEATURE (5): Xaa equals any of the twenty naturally occurring L-amino acids
  MISC_FEATURE (6): Xaa equals any of the twenty naturally occurring L-amino acids
  MISC_FEATURE (26): Xaa equals any of the twenty naturally occurring L-amino acids
  MISC_FEATURE (49): Xaa equals any of the twenty naturally occurring L-amino acids
  MISC_FEATURE (56): Xaa equals any of the twenty naturally occurring L-amino acids
  MISC_FEATURE (59): Xaa equals any of the twenty naturally occurring L-amino acids
ANHAXXHLSQFDLTNVASMVPPIETXNQWIKHQPQKGGHLPQLHPKGGXPFTKKFXSAXHGRDSDKRPSLGLAPGGLAVVGRSAGGEPGPEAGRAADGGERPLAASPPGTVKAEEHQRQNINKFERRQARPPDASAARGGEDTNDLQQKLEEVRQPPPRVRPVPSLVPRPPQTSLVKFVGNIYTLKCRFCEVEFQGPLSIQEEWVRHLQRHILEMNFSKADPPPEESQAPQAQTAAAEAP

SEQ ID NO: 2978 - protein, 184 aa, Homo sapiens
  MISC_FEATURE (26): Xaa equals any of the twenty naturally occurring L-amino acids
  MISC_FEATURE (36): Xaa equals any of the twenty naturally occurring L-amino acids
  MISC_FEATURE (123): Xaa equals any of the twenty naturally occurring L-amino acids
ALPRPTRPMYVKRMSLCGKTWADLLXHVREPIKREXLCGVCRKTFNAKDYLKQPMKTHAPERDVCRCPREGCGRTYTTVFNLQSHILSFHEESRPFVCEHAGCGKTFAMKQSLPRHAVVHDPXKKKMKLKVKKSREKRSLASHLSGYIPPKRKQGQGLSLCQNGESPNCVEDKMLSTVAVLTLG

SEQ ID NO: 2979 - protein, 82 aa, Homo sapiens
GLHRVCQCPAEEHAAEQEESHPQSGGDPGDPQGWLTINNISLMKGGSKEYWFVLTAESLSWYKDEEEKEKKYMLPLDNLQDP

SEQ ID NO: 2980 - protein, 395 aa, Homo sapiens
  MISC_FEATURE (367): Xaa equals any of the twenty naturally occurring L-amino acids
GSKTHLLPQLEAPSSLTPSSELSSPGQSELTNMDLAALFSDTPANASGSAGGSDEALNSGILTIDVTSVSSSLGGNLPANNSSLGPMEPLVLVAHSDIPPSLDSPLVLGTAATVLQQGSFSVDDVQTVSAGALGCLVALPMKNLSDDPLALTSNSNLAAHITTPTSSSTPRENASVPELLAPIKVEPDSPSRPGAVGQQEGSHGLPQSTLPSPAEQHGAQDTELSAGTGNFYLESGGSARTDYRAIQLAKEKKQRGAGSNAGASQSTQRKIKEGKMSPPHFHASQNSWLCGSLVVPSGGRPGPAPAAGVQCGAQGVQVQLVQDDPSGEGVLPSARGQPPSSPSSLWTCPSTSSRRCSPHLEALLDRXPPSSQEALSTCRICSDGSLGLGRPKATV

SEQ ID NO: 2981 - protein, 245 aa, Homo sapiens
NPEDPTVIAENELLGAAAAIEAAAKKLEQLKPRAKPKEADESLNFEEQILEAAKSIAAATSALVKAASAAQRELVAQGKVGAIPANALDDGQWSQGLISAARMVAAATNNLCEAANAAVQGHASQEKLISSAKQVAASTAQLLVACKVKADQDSEAMKRLQAAGNAVKRASDNLVKAAQKAAAFEEQENETVVVKEKMVGGIAQIIAAQEEMLRKERELEEARKKLAQIRQQQYKFLPSELRDEH

SEQ ID NO: 2982 - protein, 456 aa, Homo sapiens
  MISC_FEATURE (435): Xaa equals any of the twenty naturally occurring L-amino acids
SSNMRMASIMVWVMIIMVILVLGYGIFHCYMEYSRLRGEAGSDVSLVDLGFQTDFRVYLHLRQTWLAFMIILSILEVIIILLLIFLRKRILIAIALIKEASRAVGYVMCSLLYPLVTFFLLCLCIAYWASTAVFLSTSNEAVYKIFDDSPCPFTAKTCNPETFPSSNESRQCPNARCQFAFYGGESGYHRALLGLQIFNAFMFFWLANFVLALGQVTLAGAFASYYWALRKPDDLPAFPLFSAFGRALRYHTGSLAFGALILAIVQIIRVILEYLDQRLKAAENKFAKCLMTCLKCCFWCLEKFIKFLNRNAYIMIAIYGTNFCTSARNAFFLLMRNIIRVAVLDKVTDFLFLLGKLLIVGSVGILAFFFFTHRIRIVQDTAPPLNYYWVPILTVIVGSYLIAHGFFSVYGMCVDTLFLCFLEDLERNDGSAERXYFMSSTLKKLLNKTNKKAAES

SEQ ID NO: 2983 - protein, 161 aa, Homo sapiens
APRRAARRARARGVVVSPKAEAAAGARRRRACEAVVLPALVFPLLSGWRRPKRCWARSPFLSLRRPLPALSRCTVSPTQDCPGPDMARGQQKIQSQQKNAKKQAGQKKKQGHDQKAAAKAALIYTCTVCRTQMPDPKTFKQHFESKHPKTPLPPELADVQA

SEQ ID NO: 2984 - protein, 133 aa, Homo sapiens
  MISC_FEATURE (10): Xaa equals any of the twenty naturally occurring L-amino acids
  MISC_FEATURE (13): Xaa equals any of the twenty naturally occurring L-amino acids
  MISC_FEATURE (14): Xaa equals any of the twenty naturally occurring L-amino acids
TNHANVNEGXVPXXMLVANDQMALGAMRAITESGLRVGADISVVGYDDTEDSSCYIPPLTTIKQDFRLLGQTSVDRLLQLSQGQAVKGNQLLPVSLVKRKTTLAPNTQTASPRALADSLMQLARQVSRLESGQ

SEQ ID NO: 2985 - protein, 184 aa, Homo sapiens
SVELLLARDLVLMLAAGVGGQGERLAGRRRKMAVESRVTQEEIKKEPEKPIDREKTCPLLLRVFTTNNGRHHRMDEFSRGNVPSSELQIYTWMDATLKELTSLVKEVYPEARKKGTHFNFAIVFTDVKRPGYRVKEIGSTMSGRKGTDDSMTLQSQKFQIGDYLDIAITPPNRAPPPSGRMRPY

SEQ ID NO: 2986 - protein, 163 aa, Homo sapiens
RKMAVESRVTQEEIKKEPEKPIDREKTCPLLLRVFTTNNGRHHRMDEFSRGNVPSSELQIYTWMDATLKELTSLVKEVYPEARKKGTHFNFAIVFTDVKRPGYRVKDFLSYRVKEIGSTMSGRKGTDDSMTLQSQKFQIGDYLDIAITPPNRAPPPSGRMRPY

SEQ ID NO: 2987 - protein, 262 aa, Homo sapiens
  MISC_FEATURE (90): Xaa equals any of the twenty naturally occurring L-amino acids
  MISC_FEATURE (106): Xaa equals any of the twenty naturally occurring L-amino acids
MKTPFGKTPGQRSRADAGHAGVSANMMKKRTSHKKHRSSVGPSKPVSQPRRNIVGCRIQHGWKEGNGPVTQWKGTVLDQVPVNPSLYLIXYDGFDCVYGLELNKDXRVSALEVLPDRVATSRISDAHLADTMIGKAVEHMFETEDGSKDEWRGMVLARAPVMNTWFYITYEKDPVLYMYQLLDDYKEGDLRIMPDSNDSPPAEREPGEVVDSLVGKQVEYAKEDGSKRTGMVIHQVEAKPSVYFIKFDDDFHIYVYDLVKTS

SEQ ID NO: 2988 - protein, 195 aa, Homo sapiens
  MISC_FEATURE (37): Xaa equals any of the twenty naturally occurring L-amino acids
  MISC_FEATURE (168): Xaa equals any of the twenty naturally occurring L-amino acids
  MISC_FEATURE (177): Xaa equals any of the twenty naturally occurring L-amino acids
GRAQSPRHALYPPSPRKHAEPSSSPSKVSNKFTFKVXPPSHARYPSQLDGEARGLAHPPSYSNPPVYHGNSPKHFPTANSSFASPQFSPGTQLNPSRRPHGSTLSVSASPEKSYSRPSPLVLPSSRIEVLPVDTGAGGYSGNSGSPKNGKLIIPPVDYLPDNRTWSEXSYTYRPETXGQSWTRDASRGNLPKYSA

SEQ ID NO: 2989 - protein, 461 aa, Homo sapiens
  MISC_FEATURE (83): Xaa equals any of the twenty naturally occurring L-amino acids
  MISC_FEATURE (250): Xaa equals any of the twenty naturally occurring L-amino acids
TQSLQQDAQLAELSFLPQSSVASQSSSEGKLATKGDSSERERREQNLPARPSRAPVSICGGGENTSKSAEEPVVRPKIRNLAXPNCVKPKIFFDTDDDDDMPHSTSRWRDTANDNEGHSDGLARRGRGESSSGYPEPKYPEDKREARSDQVKPEKVPRRRRTMADPDFWTHSDDYYKYCDEDSDSDKEWIAALRRKYRSREQTLSSSGESWETLPGKEEREPPQAKVSASTGTSPGPGASASAGAGAGAXAGSNGSNYLEEVREPSLQEEQASLEEGEIPWLQYHENDSSSEGDNDSGHELMQPGVFMLDGNNNLEDDSSVSEDLEVDWSLFDGFADGLGVAEAISYVDPQFLTYMALEERLAQAMETALAHLESLAVDVEVANPPASKESIDALPEILVTEDHGAVGQEMCCPICCSEYVKGEVATELPCHHYFHKPCVSIWLQKSGTCPVCRCMFPPPL

SEQ ID NO: 2990 - protein, 444 aa, Homo sapiens
  MISC_FEATURE (418): Xaa equals any of the twenty naturally occurring L-amino acids
ARNKCKDFRQFFATSEDLNTNQKIYDQEKSHGEESQGENTDGEETHSEETHGQETIEDPVIQGSDMEDPQKDDPDDKIYECEDCGLGFVDLTDLTDHQKVHSRKCLVDSREYTHSVIHTHSISEYQRDYTGEQLYECPKCGESFIHSSFLFEHQRIHEQDQLYSMKGCDDGFIALLPMKPRRNRAAERNPALAGSAIRCLLCGQGFIHSSALNEHMRLHREDDLLEQSQMAEEAIIPGLALTEFQRSQTEERLFECAVCGESFVNPAELADHVTVHKNEPYEYGSSYTHTSFLTEPLKGAIPFYECKDCGKSFIHSTVLTKHKELHLEEEEEDEAAAAAAAAAQEVEANVHVPQVVLRIQGLNVEAAEPEVEAAEPEVEAAEPEVEAAEPNGEAEGPDGEAAEPIGEAGQPNGEAEQXNGDADEPDGAGIEDPEERAEEPEGKS

SEQ ID NO: 2991 - protein, 138 aa, Homo sapiens
  MISC_FEATURE (138): Xaa equals any of the twenty naturally occurring L-amino acids
EEETSQFSLTASPTPPGPEPLPPKGLQYLVLLSHAHSRECSLVPGLRGPGGQDGGLVWECSAGHTFSWGPSLSPTPSEAPKPASLPHTTRRSWCSEATSGQELADLESEHDERTQEARLPRKGGTPTRDLPTSRRGRX

SEQ ID NO: 2992 - protein, 349 aa, Homo sapiens
RLSVAARGASQPARAPASLPPRVPRCPPRAGAMRLGPRTAALGLLLLCAAAAGAGKAEELHYPLGERRSDYDREALLGVQEDVDEYVKLGHEEQQKRLQAIIKKIDLDSDGFLTESELSSWIQMSFKHYAMQEAKQQFVEYDKNSDDTVTWDEYNIQMYDRVIDFDENTALDDAEEESFRKLHLKDKKRFEKANQDSGPGLSLEEFIAFEHPEEVDYMTEFVIQEALEEHDKNGDGFVSLEEFLGDYRWDPTANEDPEWILVEKDRFVNDYDKDNDGRLDPQELLPWVVPNNQGIAQEEALHLIDEMDLNGDKKLSEEEILENPDLFLTSEATDYGRQLHDDYFYHDEL

SEQ ID NO: 2993 - protein, 479 aa, Homo sapiens
AAARALLPPMLLLLLQPPPLLARALPPDVHHLHAERRGPQPWHAALPSSPAPAPATQEAPRPASSLRPPRCGVPDPSDGLSARNRQKRFVLSGGRWEKTDLTYRILRFPWQLVQEQVRQTMAEALKVWSDVTPLTFTEVHEGRADIMIDFARYWHGDDLPFDGPGGILAHAFFPKTHREGDVHFDYDETWTIGDDQGTDLLQVAAHEFGHVLGLQHTTAAKALMSAFYTFRYPLSLSPDDCRGVQHLYGQPWPTVTSRTPALGPQAGIDTNEIAPLEPDAPPDACEASFDAVSTIRGELFFFKAGFVWRLRGGQLQPGYPALASRHWQGLPSPVDAAFEDAQGHIWFFQGAQYWVYDGEKPVLGPAPLTELGLVRFPVHAALVWGPEKNKIYFFRGRDYWRFHPSTRRVDSPVPRRATDWRGVPSEIDAAFQDADGYAYFLRGRLYWKFDPVKVKALEGFPRLVGPDFFGCAEPANTFL

SEQ ID NO: 2994 - protein, 221 aa, Homo sapiens
  MISC_FEATURE (5): Xaa equals any of the twenty naturally occurring L-amino acids
  MISC_FEATURE (6): Xaa equals any of the twenty naturally occurring L-amino acids
  MISC_FEATURE (7): Xaa equals any of the twenty naturally occurring L-amino acids
SPLGXXXGDSDYEEEEEEEQTPPPQPRTAQPQKREEQTKKENEEDKLTDWNKLACLLCRRQFPNKEVLIKHQQLSDLHKQNLEIHRKIKQSEQELAYLERREREGKFKGRGNDRREKLQSFDSPERKRIKYSRETDSDRKLVDKEDIDTSSKGGCVQQATGWRKGTGLGYGHPGLASSEEAEGRMRGPSVGASGRTSKRQSNETYRDAVRRVMFARYKELD

SEQ ID NO: 2995 - protein, 223 aa, Homo sapiens
PSTQSTAAAAAILAFCQKRPRREEEALLVSVRALVRMVKLFIGNLPREATEQEIRSLFEQYGKVLECDIIKNYGFVHIEDKTAAEDAIRNLHHYKLHGVNINVEASKNKSKTSTKLHVGNISPTCTNKELRAKFEEYGPVIECDIVKDYAFVHMERAEDAVEAIRGLDNTEFQGKRMHVQLSTSRLRTAPWYGRPEWLLSVWERRALVQRVPSRSYGSCGRLY

SEQ ID NO: 2996 - protein, 319 aa, Homo sapiens
  MISC_FEATURE (165): Xaa equals any of the twenty naturally occurring L-amino acids
RRMLQQVNGHNPGSDGQAREYLREDLQEFLGGEVLLYKLDDLTRVNPVTLETVLRCLQARYMADTFYTNAGCTLVALNPFKPVPQLYSPELMREYHAAPQPQKLKPHVFTVGEQTYRNVKSLIEPVNQSIVVSGESGAGKTWTSRCLMKFYAVVATSPASWESHXIAERIEQRILNSNPVMEAFGNACTLRNNNSSRFGKFIQLQLNRAQQMTGAAVQTYLLEKTRVACQASSERNFHIFYQICKGASEDERLQWHLPEGAAFSWLPNPERSLEEDCFEVTREAMLHLGIDTPTQNNIFKVRRKATPLKFGRDDGQPFA

SEQ ID NO: 2997 - protein, 506 aa, Homo sapiens
  MISC_FEATURE (70): Xaa equals any of the twenty naturally occurring L-amino acids
SSSTREFAAASTDFAFIANPSSTEISSITGNIELNQQTCLLTLRDYNNREKSEVSTDLIQANPKQGALGXKSSQTKKKKKAFNSPKTGQNKTVQYPSDILENASVELFLDANKLPTPVVEQVAQINDNSELELTSVVENTFPAQDIVHTVTVKRKRGKSQPNCALKEHSMSNIASVKSPYEAENSGEELDQRYSKAKPMCNTCGKVFSEASSLRRHMRIHKGVKPYVCHLCGKAFTQCNQLKTHVRTHTGEKPYKCELCDKGFAQKCQLVFHSRMHHGEEKPYKCDVCNLQFATSSNLKIHARKHSGEKPYVCDRCGQRFAQASTLTYHVRRHTGEKPYVCDTCGKAFAVSSSLITHSRKHTGEKPYICGICGKSFISSGELNKHFRSHTGERPFICELCGNSYTDIKNLKKHKTKVHSGADKTLDSSAEDHTLSEQDSIQKSPLSETMDVKPSDMTLPLALPLGTEDHHMLLPVTDTQSPTSDTLLRSTVNGYSEPQLIFLQQLY

SEQ ID NO: 2998 - protein, 197 aa, Homo sapiens
  MISC_FEATURE (20): Xaa equals any of the twenty naturally occurring L-amino acids
LGCSGWLPFQSCYCCKLSMXEGDPAIYAERAGYDKLWHPACFVCSTCHELLVDMIYFWKNEKLYCGRHYCDSEKPRCAGCDELIFSNEYTQAENQNWHLKHFCCFDCDSILAGEIYVMVNDKPVCKPCYVKNHAVVCQGCHNAIDPEVQRVTYNNFSWHASTECFLCSCCSKCLIGQKFMPVEGMVFCSVECKKRMS

SEQ ID NO: 2999 - protein, 216 aa, Homo sapiens
RTAAASSWRRRDGGGGRAWKPGRRQAHHPGPLRKGGRWEKHHLHGAGPGTAPCRQEALIKQFVSDVAWGELDYLVVDTPPGTSDEHMATIEALRPYQPLGALVVTTPQAVSVGDVRRELTFCRKTGLRVMGIVENMSGFTCPHCTECTSVFSRGGGEELAQLAGVPFLGSVPLDPALMRTLEEGHDFIQEFPGSPAFAALTSIAQKILDATPACLP

SEQ ID NO: 3000 - protein, 376 aa, Homo sapiens
VPHPVRVQILSALPSVSCRAGTYYDGARERCILCPNGTFQNEEGQMTCEPCPRPGNSGALKTPEAWNMSECGGLCQPGEYSADGFAPCQLCALGTFQPEAGRTSCFPCGGGLATKHQGATSFQDCETRVQCSPGHFYNTTTHRCIRCPVGTYQPEFGKNNCVSCPGNTTTDFDGSTNITQCKNRRCGGELGDFTGYIESPNYPGNYPANTECTWTINPPPKRRILIVVPEIFLPIEDDCGDYLVMRKTSSSNSVTTYETCQTYERPIAFTSRSKKLWIQFKSNEGNSARGFQVPYVTYDEDYQELIEDIVRDGRLYASENHQEILKDKKLIKALFDVLAHPQNYFKYTAQESREMFPRSFIRLLRSKVSRFLRPYK

SEQ ID NO: 3001 - protein, 652 aa, Homo sapiens
  MISC_FEATURE (169): Xaa equals any of the twenty naturally occurring L-amino acids
  MISC_FEATURE (200): Xaa equals any of the twenty naturally occurring L-amino acids
IPADSAELKQMVMSLRVSELQVLLGYAGRNKHGRKHELLTKALHLLKAGCSPAVQMKIKELYRRRFPQKIMTPADLSIPNVHSSPMPATLSPSTIPQLTYDGHPASSPLLPVSLLGPKHELELPHLTSALHPVHPDIKLQKLPFYDLLDELIKPTSLASDNSQRFRETXFAFALTPQQVQQISSSMDISGTKCDFTVQVXLRFCLSETSCPQEDHFPPNLCVKVNTKPCSLPGYLPPTKNGVEPKRPSRPINITSLVRLSTTVPNTIVVSWTAEIGRNYSMAVYLVKQLSSTVLLQRLRAKGIRNPDHSRALIKEKLTADPDSEIATTSLRVSLLCPLGKMRLTIPCRALTCSHLQCFDATLYIQMNEKKPTWVCPVCDKKAPYEHLIIDGLFMEILKYCTDCDEIQFKEDGTWAPMRSKKEVQEVSASYNGVDGCLSSTLEHQVASHHQSSNKNKKVEVIDLTIDSSSDEEEEEPSAKRTCPSLSPTSPLNNKGILSLPHQASPVSRTPSLPAVDTSYINTSLIQDYRHPFHMTPMPYDLQGLDFFPFLSGDNQHYNTSLLAAAAAAVSDDQDLLHSSRFFPYTSSQMFLDQLSAGGSTSLPTTNGSSSGSNSSLVSSNSLRESHSHTVTNRSSTDTASIFGIIPDIISLD

SEQ ID NO: 3002 - protein, 452 aa, Homo sapiens
  MISC_FEATURE (23): Xaa equals any of the twenty naturally occurring L-amino acids
  MISC_FEATURE (80): Xaa equals any of the twenty naturally occurring L-amino acids
EAAARNDLEEVRQFLGSGVSPDXANEDGLTALHQCCIDDFREMVQQLLEAGANINACDSECWTPLHAAATCGHLHLVELXIASGANLLAVNTDGNMPYDLCDDEQTLDCLETAMADRGITQDSIEAARAVPELRMLDDIRSRLQAGADLHAPLDHGATLLHVAAANGFSEAAALLLEHRASLSAKDQDGWEPLHAAAYWGQVPLVELLVAHGADLNAKSLMDETPLDVCGDEEVRAKLLELKHKHDALLRAQSRQRSLLRRRTSSAGSRGKVVRRVSLTQRTDLYRKQHAQEAIVWQQPPPTSPEPPEDNDDRQTGAELRPPPPEEDNPEVVRPHNGRVGGSPVRHLYSKRLDRSVSYQLSPLDSTTPHTLVHDKAHHTLADLKRQRAAAKLQRPPPEGPESPETAEPGLPGDTVTPQPDCGFRAGGDPPLLKLTAPAVEAPVERRPCCLLM

SEQ ID NO: 3003 - protein, 59 aa, Homo sapiens
LRELERYVTSCLRKKRKPQAEKVDVIAGSSKMKGFSSSESESSSESSSSDSEDSETGPA

SEQ ID NO: 3004 - protein, 114 aa, Homo sapiens
HEVEPVRASRNKRPTFLKIKKPLSYRKPMDTDLVYIEKSPNYCEEDPVTGSVGTQGRACNKTAPQASGCDLMCCGRGYNTHQYARVWQCNCKFHWCCYVKCNTCSERTEMYTCK

SEQ ID NO: 3005 - protein, 309 aa, Homo sapiens
PPVPPASRSDMAQNLKDLAGRLPAGPRGMGTALKLLLGAGAVAYGVRESVFTVEGGHRAIFFNRIGGVQQDTILAEGLHFRIPWFQYPIIYDIRARPRKISSPTGSKDLQMVNISLRVLSRPNAQELPSMYQRLGLDYEERVLPSIVNEVLKSVVAKFNASQLITQRAQVSLLIRRELTERAKDFSLILDDVAITELSFSREYTAAVEAKQVAQQEAQRAQFLVEKAKQEQRQKIVQAEGEAEAAKMLGEALSKNPGYIKLRKIRAAQNISKTIATSQNRIYLTADNLVLNLQDESFTRGSDSLIKGKK

SEQ ID NO: 3006 - protein, 310 aa, Homo sapiens
  MISC_FEATURE (110): Xaa equals any of the twenty naturally occurring L-amino acids
  MISC_FEATURE (143): Xaa equals any of the twenty naturally occurring L-amino acids
  MISC_FEATURE (151): Xaa equals any of the twenty naturally occurring L-amino acids
PTKPGLLPSLFKGLRETLSRNLELGLTQGSFAFIHKDFDVKETFFNLSKRYFDTECVPMNFRNASQAKRLMNHYINKETRGKIPKLFDEINPETKLILVDYILFKGKWLXPFDPVFTEVDTFHLDKYKTIKVPMMYSAGKFAXTFDKNFRXHVLKLPYQGNATMLVVLMEKMGDHLALEDYLTTDLVETWLRNMKTRNMEVFFPKFKLDQKYEMHELLRQMGIRRIFSPFADLSELSATGRNLQVSRVLQRTVIEVDERGTEAVAGILSEITAYSMPPVIKVDRPFHFMIYEETSGMLLFLGRVVNPTLL

SEQ ID NO: 3007 - protein, 408 aa, Homo sapiens
QVTGTGIPGSTHASGRIDQLTNILAPMAVGQIMTFGSPVIGCGFISGWNLVSMCVEYVLLWKVYQKTPALAVKAGLKEEETELKQLNLHKDTEPKPLEGTHLMGVKDSNIHELEHEQEPTCASQMAEPFRTFRDGWVSYYNQPVFLAGMGLAFLYMTVLGFDCITTGYAYTQGLSGSILSILMGASAITGIMGTVAFTWLRRKCGLVRTGLISGLAQLSCLILCVISVFMPGSPLDLSVSPFEDIRSRFIQGESITPTKIPEITTEIYMSNGSNSANIVPETSPESVPIISVSLLFAGVIAARIGLWSFDLTVTQLLQENVIESERGIINGVQNSMNYLLDLLHFIMVILAPNPEAFGLLVLISVSFVAMGHIMYFRFAQNTLGNKLFACGPDAKEVRKENQANTSVV

SEQ ID NO: 3008 - protein, 70 aa, Homo sapiens
YASSKLTLTKGNKSWSSTAVAAALELVDPPGCRNSARVRGTAAAGSWLSRPLVTPPALPGASSLEVESSQ

SEQ ID NO: 3009 - protein, 409 aa, Homo sapiens
REQKLELHRGGGRSRTSGSPGLQEFGTSSPAALLRAGSSTKFTANALALGSRMATTVPDGCRNGLKSKYYRLCDKAEAWGIVLETVATAGVVTSVAFMLTLPILVCKVQDSNRRKMLPTQFLFLLGVLGIFGLTFAFIIGLDGSTGPTRFFLFGILFSICFSCLLAHAVSLTKLVRGRKPLSLLVILGLAVGFSLVQDVIAIEYIVLTMNRTNVNVFSELSAPRRNEDFVLLLTYVLFLMALTFLMSSFTFCGSFTGWKRHGAHIYLTMLLSIAIWVAWITLLMLPDFDRRWDDTILSSALAANGWVFLLAYVSPEFWLLTKQRNPMDYPVEDAFCKPQLVKKSYGVENRAYSQEEITQGFEETGDTLYAPYSTHFQLQNQPPQKEFSIPRAHAWPSPYKDYEVKKEGS

SEQ ID NO: 3010 - protein, 682 aa, Homo sapiens
  MISC_FEATURE (20): Xaa equals any of the twenty naturally occurring L-amino acids
  MISC_FEATURE (39): Xaa equals any of the twenty naturally occurring L-amino acids
SSDGAWAGKASVPTPAAPRXAPERAGRGERGPGGGESSXLCFPGLPGLPGPPGPPGPVVYVSEQDGSVLSVPGPEGRPGFAGFPGPAGPKGNLGSKGERGSPGPKGEKGEPGSIFSPDGGALGPAQKGAKGEPGFRGPPGPYGRPGYKGEIGFPGRPGRPGMNGLKGEKGEPGDASLGFGMRGMPGPPGPPGPPGPPGTPVYDSNVFAESSRPGPPGLPGNQGPPGPKGAKGEVGPPGPPGQFPFDFLQLEAEMKGEKGDRGDAGQKGERGEPGGGGFFGSSLPGPPGPPGPRGYPGIPGPKGESIRGQPGPPGPQGPPGIGYEGRQGPPGPPGPPGPPSFPGPHRQTISVPGPPGPPGPPGPPGTMGASSGVRLWATRQAMLGQVHEVPEGWLIFVAEQEELYVRVQNGFRKVQLEARTPLPRGTDNEVAALQPPVVQLHDSNPYPRREHPHPTARPWRADDILASPPRLPEPQPYPGAPHHSSYVHLRPARPTSPPAHSHRDFQPVLHLVALNSPLSGGMRGIRGADFQCFQQARAVGLAGTFRAFLSSRLQDLYSIVRRADRAAVPIVNLKDELLFPSWEALFSGSEGPLKPGARIFSFDGKDVLRHPTWPQKSVWHGSDPNGRRLTESYCETWRTEAPSATGQASSLLGGRLLGQSAASCHHAYIVLCIENSFMTASK

SEQ ID NO: 3011 - protein, 394 aa, Homo sapiens
  MISC_FEATURE (11): Xaa equals any of the twenty naturally occurring L-amino acids
LPLAAHYSLPXGRHGRLDSPTFHLTLHYPTEHVQFWVGSPSTPAGWVREGDTVQLLCRGDGSPSPEYTLFRLQDEQEEVLNVNLEGNLTLEGVTRGQSGTYGCRVEDYDAADDVQLSKTLELRVAYLDPLELSEGKVLSLPLNSSAVVNCSVHGLPTPALRWTKDSTPLGDGPMLSLSSITFDSNGTYVCEASLPTVPVLSRTQNFTLLVQGSPELKTAEIEPKADGSWREGDEVTLICSARGHPDPKLSWSQLGGSPAEPIPGRQGWVSSSLTLKVTSALSRDGISCEASNPHGNKRHVFHFGTVSPQTSQAGVAVMAVAVSVGLLLLVVAVFYCVRRKGGPCCRQRREKGAPPPGEPGLSHSGSEQPEQTGLLMGGASGGARGGSGGFGDEC

SEQ ID NO: 3012 - protein, 319 aa, Homo sapiens
ETMAKNPPENCEDCHILNAEAFKSKKICKSLKICGLVFGILALTLIVLFWGSKHFWPEVPKKAYDMEHTFYSNGEKKKIYMEIDPVTRTEIFRSGNGTDETLEVHDFKNGYTGIYFVGLQKCFIKTQIKVIPEFSEPEEEIDENEEITTTFFEQSVIWVPAEKPIENRDFLKNSKILEICDNVTMYWINPTLISVSELQDFEEEGEDLHFPANEKKGIEQNEQWVVPQVKVEKTRHARQASEEELPINDYTENGIEFDPMLDERGYCCIYCRRGNRYCRRVCEPLLGYYPYPYCYQGGRVICRVIMPCNWWVARMLGRV

SEQ ID NO: 3013 - protein, 229 aa, Homo sapiens
NAFNVFTFVFHLAECNIHTSPSPGIQVRHVYTPSTTKHFSPIKQSTTLTNKHRGNEVSTTPLLANSLSVHQLAAQGEMLYLATRIEQENVINHTDEEGFTPLMWAAAHGQIAVVEFLLQNGADPQLLGKGRESALSLACSKGYTDIVKMLLDCGVDVNEYDWNGGTPLLYAVHGNHVKCVKMLLESGADPTIETDSGYNSMDLAVALGYRSVQQVIESHLLKLLQNIKE

SEQ ID NO: 3014 - protein, 368 aa, Homo sapiens
LGLQEIRNESHDYPHRVAKFPENRNRNRYRDVSPYDHSRVKLQNAENDYINASLVDIEEAQRSYILTQGPLPNTCCHFWLMVWQQKTKAVVMLNRIVEKESVKCAQYWPTDDQEMLFKETGFSVKLLSEDVKSYYTVHLLQLENINSGETRTISHFHYTTWPDFGVPESPASFLNFLFKVRESGSLNPDHGPAVIHCSAGIGRSGTFSLVDTCLVLMEKGDDINIKQVLLNMRKYRMGLIQTPDQLRFSYMAIIEGAKCIKGDSSIQKRWKELSKEDLSPAFDHSPNKIMTEKYNGNRIGLEEEKLTGDRCTGLSSKMQDTMEENSESALRKRIREDRKATTAQKVQQMKQRLNENERKRKRPRLTDT

SEQ ID NO: 3015 - protein, 921 aa, Homo sapiens
  MISC_FEATURE (247): Xaa equals any of the twenty naturally occurring L-amino acids
  MISC_FEATURE (362): Xaa equals any of the twenty naturally occurring L-amino acids
VGAPGKLPDPERRRSASLSASQSASPPAQYLSLLGPRKLSAVCLARTAAEALIMATFISVQLKKTSEVDLAKPLVKFIQQTYPSGGEEQAQYCRAAEELSKLRRAAVGRPLDKHEGALETLLRYYDQICSIEPKFPFSENQICLTFTWKDAFDKGSLFGGSVKLALASLGYEKSCVLFNCAALASQIAAEQNLDNDEGLKIAAKHYQFASGAFLHIKETVLSALSREPTVDISPDTVGTLSLIMLAXAQEVFFLKATRDKMKDAIIAKLANQAADYFGDAFKQCQYKDTLPKEVFPVLAAKHCIMQANAEYHQSILAKQQKKFGEEIARLQHAAELIKTVASRYDEYVNVKDFSDKINRALXAAKKDNDFIYHDRVPDLKDLDPIGKATLVKSTPVNVPISQKFTDLFEKMVPVSVQQSLAAYNQRKADLVNRSIAQMREATTLANGVLASLNLPAAIEDVSGDTVPQSILTKSRSVIEQGGIQTVDQLIKELPELLQRNREILDESLRLLDEEEATDNDLRAKFKERWQRTPSNELYKPLRAEGTNFRTVLDKAVQADGQVKECYQSHRDTIVLLCKPEPELNAAIPSANPAKTMQGSEVVNVLKSLLSNLDEVKKEREGLENDLKSVNFDMTSKFLTALAQDGVINEEALSVTELDRVYGGLTTKVQESLKKQEGLLKNIQVSHQEFSKMKQSNNEANLREEVLKNLATAYDNFVELVANLKEGTKFYNELTEILVRFQNKCSDIVFARKTERDELLKDLQQSIAREPSAPSIPTPAYQSLPAGGHAPTPPTPAPRTMPPTKPQPPARPPPPVLPANRAPSATAPSPVGAGTAAPAPSQTPGSAPPPQAQGPPYPTYPGYPGYCQMPMPMGYNPYAYGQYNMPYPPVYHQSPGQAPYPGPQQPSYPFPQPPQQSYYPQQ

SEQ ID NO: 3016 - protein, 535 aa, Homo sapiens
  MISC_FEATURE (115): Xaa equals any of the twenty naturally occurring L-amino acids
RHYKRVRVTYKESLIGRRDMHGRKDDAQKQPVKNQLGLNPQSHLPELQLFQAEGKIYKYDHMEKSVNSSSLVSPPQRISSTVKTHISHTYECNFVDSLFTQKEKANIGTEHYKCXERGKAFHQGLHFTIHQIIHTKETQFKCDICGKIFNKKSNLASHQRIHTGEKPYKCNECGKVFHNMSHLAQHRRIHTGEKPYKCNECGKVFNQISHLAQHQRIHTGEKPYKCNECGKVFHQISHLAQHRTIHTGEKPYECNKCGKVFSRNSYLVQHLIIHTGEKPYRCNVCGKVFHHISHLAQHQRIHTGEKPYKCNECGKVFSHKSSLVNHWRIHTGEKPYKCNECGKVFSHKSSLVNHWRIHTGEKPYKCNECGKVFSRNSYLAQHLIIHAGEKPYKCDECDKAFSQNSHLVQHHRIHTGEKPYKCDECGKVFSQNSYLAYHWRIHTGEKAYKCNECGKVFGLNSSLAHHRKIHTGEKPFKCNECGKAFSMRSSLTNHHAIHTGEKHFKCNECGKLFRDNSYLVRHQRFHAGKKSNTCN

SEQ ID NO: 3017 - protein, 279 aa, Homo sapiens
RPLNGTYHHHHHHHHHHPSPYSPYVGAPLTPAWPAGPFETPVLHSLQSRAGAPLPVPRGPSADLLEDLSESRECVNCGSIQTPLWRRDGTGHYLCNACGLYSKMNGLSRPLIKPQKRVPSSRRLGLSCANCHTTTTTLWRRNAEGEPVCNACGLYMKLHGVPRPLAMKKEGIQTRKRKPKNINKSKTCSGNSNNSIPMTPTSTSSNSDDCSKNTSPTTQPTASGAGAPVMTGAGESTNPENSELKYSGQDGLYIGVSLASPAEVTSSVRPDSWCALALA

SEQ ID NO: 3018 - protein, 468 aa, Homo sapiens
  MISC_FEATURE (2): Xaa equals any of the twenty naturally occurring L-amino acids
RXTTSGTLDFDEVVNDADIILVEFYAPWCGHCKKLAPEYEKAAKELSKRSPPIPLAKVDATAETDLAKRFDVSGYPTLKIFRKGRPYDYNGPREKYGIVDYMIEQSGPPSKEILTLKQVQEFLKDGDDVIIIGVFKGESDPAYQQYQDAANNLREDYKFHHTFSTEIAKFLKVSQGQLVVMQPEKFQSKYEPRSHMMDVQGSTQDSAIKDFVLKYALPLVGHRKVSNDAKRYTRRPLVVVYYSVDFSFDYRAATQFWRSKVLEVAKDFPEYTFAIADEEDYAGEVKDLGLSESGEDVNAAILDESGKKFAMEPEEFDSDTLREFVTAFKKGKLKPVIKSQPVPKNNKGPVKVVVGKTFDSIVMDPKKDVLIEFYAPWCGHCKQLEPVYNSLAKKYKGQKGLVIAKMDATANDVPSDRYKVEGFPTIYFAPSGDKKNPVKFEGGDRDLEHLSKFIEEHATKLSRTKEEL

SEQ ID NO: 3019 - protein, 477 aa, Homo sapiens
QVLMSSEDREAQEDELLALASIYDGDEFRKAESVQGGETRIYLDLPQNFKIFVSGNSNECLQNSGFEYTICFLPPLVLNFELPPDYPSSSPPSFTLSGKWLSPTQLSALCKHLDNLWEEHRGSVVLFAWMQFLKEETLAYLNIVSPFELKIGSQKKVQRRTAQASPNTELDFGGAAGSDVDQEEIVDERAVQDVESLSNLIQEILDFDQAQQIKCFNSKLFLCSICFCEKLGSECMYFLECRHVYCKACLKDYFEIQIRDGQVQCLNCPEPKCPSVATPGQVKELVEAELFARYDRLLLQSSLDLMADVVYCPRPCCQLPVMQEPGCTMGICSSCNFAFCTLCRLTYHGVSPCKVTAEKLMDLRNEYLQADEANKRLLDQRYGKRVIQKALEEMESKEWLEKNSKSCPCCGTPIEKLDGCNKMTCTGCMQYFCWICMGSLSRANPYKHFNDPGSPCFNRLFYAVDVDDDIWEDEVED

SEQ ID NO: 3020 - protein, 438 aa, Homo sapiens
  MISC_FEATURE (10): Xaa equals any of the twenty naturally occurring L-amino acids
PTRPRRRSPXPTQCGARREPRRKLSASARQARRRRAMYSGNRSGGHGYWDGGGAAGAEGPAPAGTLSPAPLFSPGTYERLALLLGSIGLLGVGNNLLVLVLYYKFQRLRTPTHLLLVNISLSDLLVSLFGVTFTFVSCLRNGWVWDTVGCVWDGFSGSLFGIVSIATLTVLAYERYIRVVHARVINFSWAWRAITYIWLYSLAWAGAPLLGWNRYILDVHGLGCTVDWKSKDANDSSFVLFLFLGCLVVPLGVIAHCYGHILYSIRMLRCVEDLQTIQVIKILKYEKKLAKMCFLMIFTFLVCWMPYIVICFLVVNGHGHLVTPTISIVSYLFAKSNTVYNPVIYVFMIRKFRRSLLQLLCLRLLRCQRPAKDLPAAGSEMQIRPIVMSQKDGDRPKKKVTFNSSSIIFIITSDESLSVDDSDKTNGSKVDVIQVRPL

SEQ ID NO: 3021 - protein, 216 aa, Homo sapiens
FGALAAAAPRAAGLGRCGRPRRAAPAGTMSPLLRRLLLAALLQLAPAQAPVSQPDAPGHQRKVVSWIDVYTRATCQPREVVVPLTVELMGTVAKQLVPSCVTVQRCGGCCPDDGLECVPTGQHQVRMQILMIRYPSSQLGEMSLEEHSQCECRPKKKDSAVKPDSPRPLCPRCTQHHQRPDPRTCRCRCRRRSFLRCQGRGLELNPDTCRCRKLRR

SEQ ID NO: 3022 - protein, 113 aa, Homo sapiens
ILLLLLLLLFLLLLLLFLNFLPDACGLSDVAHVESLQEKSQCALEEYVRSQYPNQPTRFGKLLLRLPSLRTVSSSVIEQLFFVRLVGKTPIETLIRDMLLSGSSFNWPYMAIQ

SEQ ID NO: 3023 - protein, 277 aa, Homo sapiens
SGRIPHSLPGAVAASSGSPPGSALAAVASGGDLFPGQPVSELIAQLLRAEPYPAAAGRFGAGGGAAGAVLGIDNVCELAARLLFSTVEWARHAPFFPELPVADQVALLRLSWSELFVLNAAQAALPLHTAPLLAAAGLHAAPMAAERAVAFMDQVRAFQEQVDKLGRLQVDSAEYGCLKAIALFTPDACGLSDPAHVESLQEKAQVALTEYVRAQYPSQPQRFGRLLLRLPALRAVPASLISQLFFMRLVGKTPIETLIRDMLLSGSTFNWPYGSGQ

SEQ ID NO: 3024 - protein, 101 aa, Homo sapiens
  MISC_FEATURE (1): Xaa equals any of the twenty naturally occurring L-amino acids
XFFFFFFFFFFFFFFFFFFFFFFFFTFPSFNLMQKGHRGSKIKISLPPPQTCTPAPRPQPPSSPGESKKEQVWHLQLGRERPGRCRARCWSLSKYKYRTRG

SEQ ID NO: 3025 - protein, 651 aa, Homo sapiens
REDQRLLPCRKYEQIEEGTVRRLIIHRLKADDDGIYLCEMRGRVRTVANVTVKGPILKRLPRKLDVLEGENAVLLVETLEAGVEGRWSRDGEELPVICQSSSGHMHALVLPGVTREDAGEVTFSLGNSRTTTLLRVKCVKHSPPGPPILAEMFKGHKNTVLLTWKPPEPAPETPFIYRLERQEVGSEDWIQCFSIEKAGAVEVPGDCVPSEGDYRFRICTVSGHGRSPHVVFHGSAHLVPTARLVAGLEDVQVYDGEDAVFSLDLSTIIQGTWFLNGEELKSNEPEGQVEPGALRYRIEQKGLQHRLILHAVKHQDSGALVGFSCPGVQDSAALTIQESPVHILSPQDKVSLTFTTSERVVLTCELSRVDFPATWYKDGQKVEESELLVVKMDGRKHRLILPEAKVQDSGEFECRTEGVSAFFGVTVQDPPVHIVDPREHVFVHAITSECVMLACEVDREDAPVRWYKDGQEVEESDFVVLENEGPHRRLVLPATQPSDGGEFQCVAGDECAYFTVTITDVSSWIVYPSGKVYVAAVRLERVVLTCELCRPWAEVRWTKDGEEVVESPALLLQKEDTVRRLVLPAVQLEDSGEYLCEIDDESASFTVTVTESYQSQDSSNNNPELCVLLKKPKTRRLWSRFPPWRRTAGTE

SEQ ID NO: 3026 - protein, 216 aa, Homo sapiens
WGTGAKPFVDDLQALVMGEGTCEKRRDAEYGASPEQVADNGDDHSEGGLVENHVDSTMNMLGGGGSAGRKPLKSGMKELAVFREKVTEQHRQMGKGGKHHLGLEEPKKLRPPPARTPCQQELDQVLERISTMRLPDERGPLEHLYSLHIPNCDKHGLYNLKQCKMSLNGQRGECWCVNPNTGKLIQGAPTIRGDPECHLFYNEQQEARGVHTQRMQ

SEQ ID NO: 3027 - protein, 282 aa, Homo sapiens
  MISC_FEATURE (8): Xaa equals any of the twenty naturally occurring L-amino acids
PVRNSRVXPRAPAAAAAARARTRTRGSPRMGEFNEKKTTCGTVCLKYLLFTYNCCFWLAGLAVMAVGIWTLALKSDYISLLASGTYLATAYILVVAGTVVMVTGVLGCCATFKERRNLLRLYFILLLIIFLLEIIAGILAYAYYQQLNTELKENLKDTMTKRYHQPGHEAVTSAVDQLQQEFHCCGSNNSQDWRDSEWIRSQEAGGRVVPDSCCKTVVALCGQRDHASNIYKVEGGCITKLETFIQEHLRVIGAVGIGIACVQVFGMIFTCCLYRSLKLEHY

SEQ ID NO: 3028 - protein, 134 aa, Homo sapiens; identical to SEQ ID NO: 2592

SEQ ID NO: 3029 - protein, 49 aa, Homo sapiens
ARAEFGTSLSLPSSWDYRHVPPRLANFCIFSRDGVSPCWSGWSQTPDLR

SEQ ID NO: 3030 - protein, 156 aa, Homo sapiens
  MISC_FEATURE (34): Xaa equals any of the twenty naturally occurring L-amino acids
QRVKKLFSTETSLQVHRRIHTGERPYPCPDCGKXFRQSTHLKDHRRLHTGERPFACEVCGKAFAISMRLAEHRRIHTGERPYSCPDCGKSYRSFSNLWKHRKTHQQQHQAAVRQQLAEAEAAVGLAVMETAVEALPLVEAIEIYPLAEAEGVQISG

SEQ ID NO: 3031 - protein, 78 aa, Homo sapiens
  MISC_FEATURE (73): Xaa equals any of the twenty naturally occurring L-amino acids
PVLDRRLTSVWPVPIKWMALESILRRRFTHQSDVWSYGVTVWELMTFGAKPYDGIPAREIPDLLENGGAAAPXPHLHH

SEQ ID NO: 3032 - protein, 184 aa, Homo sapiens
  MISC_FEATURE (57): Xaa equals any of the twenty naturally occurring L-amino acids
  MISC_FEATURE (165): Xaa equals any of the twenty naturally occurring L-amino acids
APWKPTVNGTMVAVEGETVSILCSTQSNPDPILTIFKEKQILSTVIYESELQLELRXVSPEDDGEYWCVAENQYGQRATAFNLSVEFAPVLLLESHCAAARDTVQCLCVVKSNPEPSVAFELPSRNVTVNESEREFVYSERRASCSPASSRCGGRPRPRPASSAXRGTSMAPRAWSCPSREPID

SEQ ID NO: 3033 - protein, 735 aa, Homo sapiens
  MISC_FEATURE (588): Xaa equals any of the twenty naturally occurring L-amino acids
LMLTMGRLQLVVLGLTCCWAVASAAKLGAVYTEGGFVEGVNKKLGLLGDSVDIFKGIPFAAPTKALENPQPHPGWQGTLKAKNFKKRCLQATITQDSTYGDEDCLYLNIWVPQGRKQVSRDLPVMIWIYGGAFLMGSGHGANFLNNYLYDGEEIATRGNVIVVTFNYRVGPLGFLSTGDANLPGNYGLRDQHMAIAWVKRNIAAFGGDPNNITLFGESAGGASVSLQTLSPYNKGLIRRAISQSGVALSPWVIQKNPLFWAKKVAEKVGCPVGDAARMAQCLKVTDPRALTLAYKVPLAGLEYPMLHYVGFVPVIDGDFIPADPINLYANAADIDYIAGTNNMDGHIFASIDMPAINKGNKKVTEEDFYKLVSEFTITKGLRGAKTTFDVYTESWAQDPSQENKKKTVVDFETDVLFLVPTEIALAQHRANAKSAKTYAYLFSHPSRMPVYPKWVGADHADDIQYVFGKPFATPTGYRPQDRTVSKAMIAYWTNFAKTGDPNMGDSAVPTHWEPYTTENSGYLEITKKMGSSSMKRSLRTNFLRYWTLTYLALPTVTDQEATPVPPTGDSEATPVPPTGDSETAPVPXTGDSGAPPVPPTGDSGAPPVPPTGDSGAPPVPPTGDSGAPPVPPTGDSGAPPVPPTGDSGAPPVPPTGDAGPPPVPPTGDSGAPPVPPTGDSGAPPVTPTGDSETAPVPPTGDSGAPPVPPTGDSEAAPVPPTDDSKEAQMPAVIRF

SEQ ID NO: 3034 - protein, 329 aa, Homo sapiens
VRLQVPVRNSRVDPRVRPRVRLRRPPRLRLCARLPDFFLLLLFRGCLIGAVNLKSSNRTPVVQEFESVELSCIITDSQTSDPRIEWKKIQDEQTTYVFFDNKIQGDLAGRAEILGKTSLKIWNVTRRDSALYRCEVVARNDRKEIDEIVIELTVQVKPVTPVCRVPKAVPVGKMATLHCQESEGHPRPHYSWYRNDVPLPTDSRANPRFRNSSFHLNSETGTLVFTAVHKDDSGQYYCIASNDAGSARCEEQEMEVYDLNIGGIIGGVLVVLAVLALITLGICCAYRRGYFINNKQDGESYKNPGKPDGVNYIRTDEEGDFRHKSSFVI

SEQ ID NO: 3035 - protein, 139 aa, Homo sapiens
AEQYGTSPHLLPTMLLSSCLPPANVTTKAATPPPLVLSLTTADPAGKPAPCRVTLTLLRASIPATKRASFLSSFIKMFFEELEYILGFLSLLKFHVHVSVYSAICHFQKEGTGNSRSFTCTPELFPRLQTHLRAEGGAQ

SEQ ID NO: 3036 - protein, 385 aa, Homo sapiens
LFHPQFQLPDQRTWMSAIENMAEKLESFSALKPEASELLQSVPSMFNFRAPPNALPENLLRKGKERYTCRYCGKIFPRSANLTRHLRTHTGEQPYRCKYCDRSFSISSNLQRHVRNIHNKEKPFKCHLCDRCFGQQTNLDRHLKKHENGNMSGTATSSPHSELESTGAILDDKEDAYFTEIRNFIGNSNHGSQSPRNVEERMNGSHFKDEKALVTSQNSDLLDDEEVEDEVLLDEEDEDNDITGKTGKEPVTSNLHEGNPEDDYEETSALEMSCKTSPVRYKEEEYKSGLSALDHIRHFTDSLKMRKMEDNQYSEAELSSFSTSHVPEELKQPLHRKSKSQAYAMMLSLSDKESLHSTSHSSSNVWHSMARAAAESSAIQSISHV

SEQ ID NO: 3037 - protein, 72 aa, Homo sapiens
  MISC_FEATURE (63): Xaa equals any of the twenty naturally occurring L-amino acids
WEGAAAMERVNDASCGPSGCYTYQVSRHSTEMLHNLNQQRKNGGRFCDVLLRVGDESFPAHRXDAGRLQRVL

SEQ ID NO: 3038 - protein, 245 aa, Homo sapiens
AAFHLLFDFLAFKNDISFWKKKKSMIGMSTKAVLWRCFSTVVIFLFLLDEQTSLLVLVPAGVGAAIELWKVKKALKMTIFWRGLMPEFQFGTYSESERKTEEYDTQAMKYLSYLLYPLCVGGAVYSLLNIKYKSWYSWLINSFVNGVYAFGFLFMLPQLFVNYKLKSVAHLPWKAFTYKAFNTFIDDVFAFIITMPTSHRLACFRDDVVFLVYLYQRWLYPVDKRRVNEFGESYEEKATRAPHTD

SEQ ID NO: 3039 - protein, 463 aa, Homo sapiens
  MISC_FEATURE (5): Xaa equals any of the twenty naturally occurring L-amino acids
  MISC_FEATURE (443): Xaa equals any of the twenty naturally occurring L-amino acids
  MISC_FEATURE (446): Xaa equals any of the twenty naturally occurring L-amino acids
  MISC_FEATURE (449): Xaa equals any of the twenty naturally occurring L-amino acids
  MISC_FEATURE (456): Xaa equals any of the twenty naturally occurring L-amino acids
PSLRXLFPTGGSVRGCVKGIKALGKYVDLKRLNTTGVSAGCTADLLVGRAMTFHGHGFLRLALSNVAPLTGNVYSGFGFHSAQDSALLYYRASPDGLCQVSLQQGRVSLQLLRTEVKTQAGFADGAPHYVAFYSNATGVWLYVDDQLQQMKPHRGPPPELQPQPEGPPRLLLGGLPESGTIYNFSGCISNVFVQRLLGPQRVFDLQQNLGSVNVSTGCAPALQAQTPGLGPRGLQATARKASRRSRQPARHPACMLPPHLRTTRDSYQFGGSLSSHLEFVGILARHRNWPSLSMHVLPRSSRGLLLFTARLRPGSPSLALFLSNGHFVAQMEGLGTRLRAQSRQRSRPGRWHKVSVRWEKNRILLVTDGARAWSQEGPTGSTRGQSTPSPTPSLWAAPGQQPQLQTSGDRRVQRLCEETEACTGGPWGPPHGWQGVNTLHLWXPLXGRXWSFPRQXGGSYQLL

SEQ ID NO: 3040 - protein, 417 aa, Homo sapiens
VSSSSFAVLFFSTCQSCSSRPVRQEHLGCRTMEELDALLEELERSTLQDSDEYSNPAPLPLDQHSRKETNLDETSEILSIQDNTSPLPAQLVYTTNIQELNVYSEAQEPKESPPPSKTSAAAQLDELMAHLTEMQAKVAVRADAGKKHLPDKQDHKASLDSMLGGLEQELQDLGIATVPKGHCASCQKPIAGKVIHALGQSWHPEHFVCTHCKEEIGSSPFFERSGLAYCPNDYHQLFSPRCAYCAAPILDKVLTAMNQTWHPEHFFCSHCGEVFGAEGFHEKDKKPYCRKDFLAMFSPKCGGCNRPVLENYLSAMDTVWHPECFVCGDCFTSFSTGSFFELDGRPFCELHYHHRRGTLCHGCGQPITGRCISAMGYKFHPEHFVCAFCLTQLSKGIFREQNDKTYCQPCFNKLFPL

SEQ ID NO: 3041 - protein, 433 aa, Homo sapiens
LEGGTMQELHLLWWALLLGLAQACPEPCDCGEKYGFQIADCAYRDLESVPPGFPANVTTLSLSANRLPGLPEGAFREVPLLQSLWLAHNEIRTVAAGALASLSHLKSLDLSHNLISDFAWSDLHNLSALQLLKMDSNELTFIPRDAFRSLRALRSLQLNHNRLHTLAEGTFTPLTALSHLQINENPFDCTCGIVWLKTWALTTAVSIPEQDNIACTSPHVLKGTPLSRLPPLPCSAPSVQLSYQPSQDGAELRPGFVLALHCDVDGQPAPQLHWHIQIPSGIVEITSPNVGTDGRALPGTPVASSQPRFQAFANGSLLIPDFGKLEEGTYSCLATNELGSAESSVDVALATPGEGGEDTLGRRFHGKAVEGKGCYTVDNEVQPSGPEDNVVIIYLSRAGNPEAAVAEGVPGQLPPGLLLLGQSLLLFFFLTSF

SEQ ID NO: 3042 - protein, 49 aa, Homo sapiens
SPCSTSPFASWRNSEEARTDRPFQQLRSLNGEWQNGSGNIWVKIAVKFW

SEQ ID NO: 3043 - protein, 601 aa, Homo sapiens
  MISC_FEATURE (95): Xaa equals any of the twenty naturally occurring L-amino acids
  MISC_FEATURE (126): Xaa equals any of the twenty naturally occurring L-amino acids
  MISC_FEATURE (142): Xaa equals any of the twenty naturally occurring L-amino acids
  MISC_FEATURE (143): Xaa equals any of the twenty naturally occurring L-amino acids
LSRAPAVSTVPHRFHQPWRPGASDSAPPAGTMAQSRVLLLLLLLPPQLHLGPVLAVRAPGFGRSGGHSLSPEENEFAEEEPVLVLSPEEPGPGPXAVKLPRDCACSQEGVVDCGGIDLREFPGDLXEHTNHLSLQNNQLEKXXPEELSRLHRLETLNLQNNRLTSRGLPEKAFEHLTNLNYLYLANNKLTLAPRFLPNALISVDFAANYLTKIYGLTFGQKPNLRSVYLHNNKLADAGLPDNMFNGSSNVEVLILSSNFLRHVPKHLPPALYKLHLKNNKLEKIPPGAFSELSSLRELYLQNNYLTDEGLDNETFWKLSSLEYLDLSSNNLSRVPAGLPRSLVLLHLEKNAIRSVDANVLTPIRSLEYLLLHSNQLREQGIHPLAFQGLKRLHTVHLYNNALERVPSGLPRRVRTLMILHNQITGIGREDFATTYFLEELNLSYNRITSPQVHRDAFRKLRLLRSLDLSGNRLHTLPPGLPRNVHVLKVKRNELAAWHEGRWRAWLSCVSCTSPATDCAAEPWAPVPGWTSPICSCWTSPGISSQRSPRGSPSHLSTCTCRTTRLVRCPPMPSTPRPTSRGSFSGLTSWLWAPWWTVPSGG

SEQ ID NO: 3044 - protein, 201 aa, Homo sapiens
  MISC_FEATURE (25): Xaa equals any of the twenty naturally occurring L-amino acids
  MISC_FEATURE (179): Xaa equals any of the twenty naturally occurring L-amino acids
  MISC_FEATURE (190): Xaa equals any of the twenty naturally occurring L-amino acids
GIGPIAASFIFCKVASLYIFLSPPXPSVSGVPYSPANSSWSCALVPLLGSGVPPHPPAPSPCCSGQTMLKMLSFKLLLLAVALGFFEGDAKFGERNEGSGARRRRCLNGNPPKRLKRRDRRMMSQLELLSGGEMLCGGFYPRLSCCLRSDSPGLGRLENKIFSVTNNTECGKLLEEIKXALCSPHSQSLXHSPEEKSWKET

SEQ ID NO: 3045 - protein, 353 aa, Homo sapiens
LESKPQKAYWLRRPRALVRFEGGLRLREEGGREASCCRGCSEARVQSRKRRGETAPRAPREEEPPGPLGSGPGRAMDSMPEPASRCLLLLPLLLLLLLLLPAPELGPSQAGAEENDWVRLPSKCEVCKYVAVELKSAFEETGKTKEVIGTGYGILDQKASGVKYTKSDLRLIEVTETICKRLLDYSLHKERTGSNRFAKGMSETFETLHNLVHKGVKVVMDIPYELWNETSAEVADLKKQCDVLVEEFEEVIEDWYRNHQEEDLTEFLCANHVLKGKDTSCLAEQWSGKKGDTAALGGKKSKKKSSRAKAAGGRSSSSKQRKELGGLEGDPSPEEDEGIQKASPLTHSPPDEL

SEQ ID NO: 3046 - protein, 219 aa, Homo sapiens
GTPAGTGPEFPGRPTRPGATATMDPPAGFVRAGNPAVAAPQSPLSPEGAHFRAAHHPRSTGSRCPGSLQPSRPLVANWLQSLPEMPVDFTGYWKMLVNENFEEYLRALDVNVALRKIANLLKPDKEIVQDGDHMIIRTLSTFRNYIMDFQVGKEFEEDLTGIDDRKCMTTVSWDGDKLQCVQKGEKEGRGWTQWIEGDELHLEMRVEGVVCKQVFKKVQ

SEQ ID NO: 3047 - protein, 339 aa, Homo sapiens
FGTRRSGCPARGHSEPGGREEGGMPQTVILPGPAPWGFRLSGGIDFNQPLVITRITPGSKAAAANLCPGDVILAIDGFGTESMTHADAQDRIKAAAHQLCLKIDRGETHLWSPQVSEDGKAHPFKINLESEPQEFKPIGTAHNRRAQPFVAAANIDDKRQVVSASYNSPIGLYSTSNIQDALHGQLRGLIPSSPQNEPTASVPPESDVYRMLHDNRNEPTQPRQSGSFRVLQGMVDDGSDDRPAGTRSVRAPVTKVHGGSGGAQRMPLCDKCGSGIVGAVVKARDKYRHPECFVCADCNLNLKQKGYFFIEGELYCETHARARTKPPEGYDTVTLYPKA

SEQ ID NO: 3048 - protein, 329 aa, Homo sapiens
VLLCQFMEDRSAQAGNCWLRQAKNGRCQVLYKTELSKEECCSTGRLSTSWTEEDVNDNTLFKWMIFNGGAPNCIPCKETCENVDCGPGKKCRMNKKNKPRCVCAPDCSNITWKGPVCGLDGKTYRNECALLKARCKEQPELEVQYQGRCKKTCRDVFCPGSSTCVVDQTNNAYCVTCNRICPEPASSEQYLCGNDGVTYSSACHLRKATCLLGRSIGLAYEGKCIKAKSCEDIQCTGGKKCLWDFKVGRGRCSLCDELCPDSKSDEPVCASDNATYASECAMKEAACSSGVLLEVKHSGSCNSISEDTEEEEEDEDQDYSFPISSILEW

SEQ ID NO: 3049 - protein, 373 aa, Homo sapiens
  MISC_FEATURE (327): Xaa equals any of the twenty naturally occurring L-amino acids
  MISC_FEATURE (329): Xaa equals any of the twenty naturally occurring L-amino acids
  MISC_FEATURE (363): Xaa equals any of the twenty naturally occurring L-amino acids
RRRSVLPVTAAAAAAPDTCGGGGDPAAGAEMWPLVAALLLGSACCGSAQLLFNKTKSVEFTFCNDTVVIPCFVTNMEAQNTTEVYVKWKFKGRDIYTFDGALNKSTVPTDFSSAKIEVSQLLKGDASLKMDKSDAVSHTGNYTCEVTELTREGETIIELKYRVVSWFSPNENILIVIFPIFAILLFWGQFGIKTLKYRSGGMDEKTIALLVAGLVITVIVIVGAILFVPGEYSLKNATGLGLIVTSTGILILLHYYVFSTAIGLTSFVIAILVIQVIAYILAVVGLSLCIAACIPMHGPLLISGLSILALAQLLGLVYMKFVASNQXTXQPPRKAVEDPLMVCGYFTLNPLPDHNLIWPAKQXECPVYALGRI

SEQ ID NO: 3050 - protein, 285 aa, Homo sapiens
  MISC_FEATURE (280): Xaa equals any of the twenty naturally occurring L-amino acids
GRAPGRRVGLRCARRTSEAAGSGAGPPGPLQGRSGSSWAPRPGRRTEERRKGAGGTRPRPAAAMNSNVENLPPHIIRLVYKEVTTLTADPPDGIKVFPNEEDLTDLQVTIEGPEGTPYAGGLFRMKLLLGKDFPASPPKGYFLTKIFHPNVGANGEICVNVLKRDWTAELGIRHVLLTIKCLLIHPNPESALNEEAGRLLLENYEEYAARARLLTEIHGGAGGPSGRAEAGRALASGTEASSTDPGAPGGPGGAEGPMAKKHAGERDKKLAAKKKTDKKXALRRL

SEQ ID NO: 3051 - protein, 811 aa, Homo sapiens
  MISC_FEATURE (86): Xaa equals any of the twenty naturally occurring L-amino acids
IGALTMSSSPVNVKKLKVSELKEELKKRRLSDKGLKAELMERLQAALDDEEAGGRPAMEPGNGSLDLGGDSAGRSGAGLEQEAAAXGDEEEEEEEEEEEGISALDGDQMELGEENGAAGAADSGPMEEEEAASEDENGDDQGFQEGEDELGDEEEGAGDENGHGEQQPQPPATQQQQPQQQRGAAKEAAGKSSGPTSLFAVTVAPPGARQGQQQAGGDGKTEQKGGDKKRGVKRPREDHGRGYFEYIEENKYSRAKSPQPPVEEEDEHFDDTVVCLDTYNCDLHFKISRDRLSASSLTMESFAFLWAGGRASYGVSKGKVCFEMKVTEKIPVRHLYTKDIDIHEVRIGWSLTTSGMLLGEEEFSYGYSLKGIKTCNCETEDYGEKFDENDVITCFANFESDEVELSYAKNGQDLGVAFKISKEVLAGRPLFPHVLCHNCAVEFNFGQKEKPYFPIPEEYTFIQNVPLEDRVRGPKGPEEKKDCEVVMMIGLPGAGKTTWVTKHAAENPGKYNILGTNTIMDKMMVAGFKKQMADTGKLNTLLQRAPQCLGKFIEIAARKKRNFILDQTNVSAAAQRRKMCLFAGFQRKAVVVCPKDEDYKQRTQKKAEVEGKDLPEHAVLKMKGNFTLPEVAECFDEITYVELQKEEAQKLLEQYKEESKKALPPEKKQNTGSKKSNKNKSGKNQFNRGGGHRGRGGFNMRGGNFRGGAPGNRGGYNRRGNMPQRGGGGGGSGGIGYPYPRAPVFPGRGSYSNRGNYNRGGMPNRGNYNQNFRGRGNNRGYKNQSQGYNQWQQGQFWGQKPWSQHYHQGYY

SEQ ID NO: 3052 - protein, 334 aa, Homo sapiens
KIFPRGSFRNPQPAGSPEGKKLKGWGKNETDEGDKAQDGENEKNSEKEQDSEVSEDTKSEEKETEENKELTDTCKERESDTGKKKVEHEISEGNVATAAAAALASAATKAKHLAAVEERKIKSLVALLVETQMKKLEIKLRHFEELETIMDREKEALEQQRQQLLTERQNFHMEQLKYAELRARQQMEQQQHGQNPQQAHQHSGGPGLAPLGAAGHPGMMPHQQPPPYPLMHHQMPPPHPPQPGQIPGPGSMMPGQHMPGRMIPTVAANIHPSGSGPTPPGMPPMPGNILGPRVPLTAPNGMYPPPPQQQPPPPPPADGVPPPPAPGPPASAAP

SEQ ID NO: 3053 - protein, 247 aa, Homo sapiens
  MISC_FEATURE (233): Xaa equals any of the twenty naturally occurring L-amino acids
PENSTSSFLLWGCPPSVVCFTVGSPARRPQCFLRAEMANSGLQLLGFSMALLGWVGLVACTAIPQWQMSSYAGDNIITAQAMYKGLWMDCVTQSTGMMSCKMYDSVLALSAALQATRALMVVSLVLGFLAMFVATMGMKCTRCGGDDKVKKARIAMGGGIIFIVAGLAALVACSWYGHQIVTDFYNPLIPTNIKYEFGPAIFIGWAGSALVILGGALLSCSCPGNESKAGYRXPRSYPKSNSSKEYV

SEQ ID NO: 3054 - protein, 255 aa, Homo sapiens
THASGRQVKFDFQAQSPKELTLQKGDIVYIHKEVDKNWLEGEAVAQYTFKGDLEVELSFRKGEHICLIRKVNENWYEGRITGTGRQGIFPASYVQVSREPRLRLCDDGPQLPTSPRLTAAARSARHPSSPSALRSPADPTDLGGQTSPRRTGFSFPTQEPRPQTQNLGTPGPALSHSRGPSHPLDLGTSSPNTSQIHWTPYRAMYQYRPQNEDELELREGDRVDVMQQCDDGWFVGVSRRTQKFGTFPGNYVAPV

SEQ ID NO: 3055 - protein, 517 aa, Homo sapiens
FLRAGLAALSPLLRSLRPSPVAAMSTGTFVVSQPLNYRGGARVEPADASGTEKAFEPATGRVIATFTCSGEKEVNLAVQNAKAAFKIWSQKSGMERCRILLEAARIIREREDEIATMECINNGKSIFEARLDIDISWQCLEYYAGLAASMAGEHIQLPGGSFGYTRREPLGVCVGIGAWNYPFQIASWKSAPALACGNAMVFKPSPFTPVSALLLAEIYSEAGVPPGLFNVVQGGAATGQFLCQHPDVAKVSFTGSVPTGMKIMEMSAKGIKPVTLELGGKSPLIIFSDCDMNNAVKGALMANFLTQGQVCCNGTRVFVQKEILDKFTEEVVKQTQRIKIGDPLLEDTRMGPLINRPHLERVLGFVKVAKEQGAKVLCGGDIYVPEDPKLKDGYYMRPCVLTNCRDDMTCVKEEIFGPVMSILSFDTEAEVLERANDTTFGLAAGVFTRDIQRAHRVVAELQAGTCFINNYNVSPVELPFGGYKKSGFGRENGRVTIEYYSQLKTVCVEMGDVESAF

SEQ ID NO: 3056 - protein, 329 aa, Homo sapiens
  MISC_FEATURE (27): Xaa equals any of the twenty naturally occurring L-amino acids
  MISC_FEATURE (159): Xaa equals any of the twenty naturally occurring L-amino acids
  MISC_FEATURE (216): Xaa equals any of the twenty naturally occurring L-amino acids
  MISC_FEATURE (241): Xaa equals any of the twenty naturally occurring L-amino acids
RGREEVRPVTLLCSPLAQNFLNAGSFXEIQGFLQLRGSGRKLWKRFFCFLRRSGLYYSTKGTSKDPRHLQYVADVNESNVYVVTQGRKLYGMPTDFGFCVKPNKLRNGHKGLRIFCSEDEQSRTCWLAAFRLFKYGVQLYKNYQQAQSRHLHPSCLGSXPLRSASDNTLVAMDFSGHAGRVIENPREALSVALEEAQAWRKKTNHRLSLPMPASGXSLSAAIHRTQLWFHGRISREESQRXIGQQGLVDGLFLVRESQRNPQGFVLSLCHLQKVKHYLILPSEEEGRLYFSMDDGQTRFTDLLQLVEFHQLNRGILPCLLRHCCTRVAL

SEQ ID NO: 3057 - protein, 434 aa, Homo sapiens
  MISC_FEATURE (1): Xaa equals any of the twenty naturally occurring L-amino acids
  MISC_FEATURE (111): Xaa equals any of the twenty naturally occurring L-amino acids
  MISC_FEATURE (132): Xaa equals any of the twenty naturally occurring L-amino acids
XNKSWSSTAVAAALELVDPPGCRNSARAGVRGVALAARAMPGRSCVALVLLAAAVSCAVAQHAPPWTEDCRKSTYPPSGPTYRGAVPWYTINLDLPPYKRWHELMLDKAPXLKVIVNSLKNMINTFVPSGKXMQVVDEKLPGLLGNFPGPFEEEMKGIAAVTDIPLGEIISFNIFYELFTICTSIVAEDKKGHLIHGRNMDFGVFLGWNINNDTWVITEQLKPLTVNLDFQRNNKTVFKASSFAGYVGMLTGFKPGLFSLTLNERFSINGGYLGILEWILGKKDAMWIGFLTRTVLENSTSYEEAKNLLTKTKILAPAYFILGGNQSGEGCVITRDRKESLDVYELDAKQGRWYVVQTNYDRWKHPFFLDDRRTPAKMCLNRTSQENISFETMYDVLSTKPVLNKLTVYTTLIDVTKGQFETYLRDCPDPCIGW

SEQ ID NO: 3058 - protein, 305 aa, Homo sapiens
GLKETHRPAKGPSLLPIHPGWPAFLLPDEVGKGNNHCVPCKAGHFQNTSSPSARCQPHTRCENQGLVEAAPGTAQSDTTCKNPLEPLPPEMSGTMLMLAVLLPLAFFLLLATVFSCIWKSHPSLCRKLGSLLKRRPQGEGPNPVAGSWEPPKAHPYFPDLVQPLLPISGDVSPVSTGLPAAPVLEAGVPQQQSPLDLTREPQLEPGEQSQVAHGTNGIHVTGGSMTITGNIYIYNGPVLGGPPGPGDLPATPEPPYPIPEEGDPGPPGLSTPHQEDGKAWHLAETEHCGATPSNRGPRNQFITHD

SEQ ID NO: 3059 - protein, 376 aa, Homo sapiens
DACRYRSGIPGYGCEKTFRRGRRGCPASCSARPARLSPRVVARHSRAMTTQQIDLQGPGPWGFRLVGGKDFEQPLAISRVTPGSKAALANLCIGDVITAIDGENTSNMTHLEAQNRIKGCTDNLTLTVARSEHKVWSPLVTEEGKRHPYKMNLASEPQEVLHIGSAHNRSAMPFTASPASSTTARVITNQYNNPAGLYSSENISNFNNALESKTAASGVEANSRPLDHAQPPSSLVIDKESEVYKMLQEKQELNEPPKQSTSFLVLQEILESEEKGDPNKPSGFRSVKAPVTKVAASIGNAQKLPMCDKCGTGIVGVFVKLRDRHRHPECYVCTDCGTNLKQKGHFFVEDQIYCEKHARERVTPPEGYEVVTVFPK

SEQ ID NO: 3060 - protein, 487 aa, Homo sapiens
PRGCWSSCLDAMFRLNSLSALAELAVGSRWYHGGSQPIQIRRRLMMVAFLGASAVTASTGLLWKRAHAESPPCVDNLKSDIGDKGKNKDEGDVCNHEKKTADLAPHPEEKKKKRSGFRDRKVMEYENRIRAYSTPDKIFRYFATLKVISEPGEAEVFMTPEDFVRSITPNEKQPEHLGLDQYIIKRFDGKKISQEREKFADEGSIFYTLGECGLISFSDYIFLTTVLSTPQRNFEIAFKMFDLNGDGEVDMEEFEQVQSIIRSQTSMGMRHRDRPTTGNTLKSGLCSALTTYFFGADLKGKLTIKNFLEFQRKLQHDVLKLEFERHDPVDGRITERQFGGMLLAYSGVQSKKLTAMQRQLKKHFKEGKGLTFQEVENFFTFLKNINDVDTALSFYHMAGASLDKVTMQQVARTVAKVELSDHVCDVVFALFDCDGNGELSNKEFVSIMKQRLMRGLEKPKDMGFTRLMQAMWKCAQETAWDFALPKQ

SEQ ID NO: 3061 - protein, 207 aa, Homo sapiens
  MISC_FEATURE (192): Xaa equals any of the twenty naturally occurring L-amino acids
SRKCHFLFLQCSVAPLRNPAFPAPVPPGEDSKDVAAPHRQPLTSSERIDKQIRYILDGISALRKETCNKSNMCESSKEALAENNLNLPKMAEKDGCFQSGFNEETCLVKIITGLLEFEVYLEYLQNRFESSEEQARAVQMSTKVLIQFLQKKAKNLDAITTPDPTTNASLLTKLQAQNQWLQDMTTHLILRXFKEFLQSSLRALRQM

SEQ ID NO: 3062 - protein, 164 aa, Homo sapiens
  MISC_FEATURE (2): Xaa equals any of the twenty naturally occurring L-amino acids
KXRNLPCHDLHLIFRDHSQNKLPQVIASYTATGPEQLTLAPGQLILIRKKNPGGWWEGELQARGKKRQIGWFPANYVKLLSPGTSKITPTEPPKSTALAAVCQVIGMYDYTAQNDDELAFNKGQIINVLNKEDPDWWKGEVNGQVGLFPSNYVKLTTDMDPSQQ

SEQ ID NO: 3063 - protein, 678 aa, Homo sapiens
  MISC_FEATURE (64): Xaa equals any of the twenty naturally occurring L-amino acids
LYILMKLFYLFQERECELPKIDVHLVPDRKKDQYKVGEVLKFSCKPGFTIVGPNSVQCYHFGLXPDLPICKEQVQSCGPPPELLNGNVKEKTKEEYGHSEVVEYYCNPRFLMKGPNKIQCVDGEWTTLPVCIVEESTCGDIPELEHGWAQLSSPPYYYGDSVEFNCSESFTMIGHRSITCIHGVWTQLPQCVAIDKLKKCKSSNLIILEEHLKNKKEFDHNSNIRYRCRGKEGWIHTVCINGRWDPEVNCSMAQIQLCPPPPQIPNSHNMTTTLNYRDGEKVSVLCQENYLIQEGEEITCKDGRWQSIPLCVEKIPCSQPPQIEHGTINSSRSSQESYAHGTKLSYTCEGGFRISEENETTCYMGKWSSPPQCEGLPCKSPPEISHGVVAHMSDSYQYGEEVTYKCFEGFGIDGPAIAKCLGEKWSHPPSCIKTDCLSLPSFENAIPMGEKKDVYKAGEQVTYTCATYYKMDGASNVTCINSRWTGRPTCRDTSCVNPPTVQNAYIVSRQMSKYPSGERVRYQCRSPYEMFGDEEVMCLNGNWTEPPQCKDSTGKCGPPPPIDNGDITSFPLSVYAPASSVEYQCQNLYQLEGNKRITCRNGQWSEPPKCLHPCVISREIMENYNIALRWTAKQKLYSRTGESVEFVCKRGYRLSSRSHTLRTTCWDGKLEYPTCAKR

SEQ ID NO: 3064 - protein, 308 aa, Homo sapiens
  MISC_FEATURE (11): Xaa equals any of the twenty naturally occurring L-amino acids
  MISC_FEATURE (88): Xaa equals any of the twenty naturally occurring L-amino acids
  MISC_FEATURE (99): Xaa equals any of the twenty naturally occurring L-amino acids
  MISC_FEATURE (100): Xaa equals any of the twenty naturally occurring L-amino acids
  MISC_FEATURE (104): Xaa equals any of the twenty naturally occurring L-amino acids
GPSTWPCCSAXTGTAPAERGSARASERWPAGSWRWRPAHTCWCSAWSSGCRPTASWCRPCCGSSRSRSPRPRCTGTGGCPRAARARVXVEWLRVRDDGXXRTSXIDSRLVSVHESGWKAFDVTEAVNFWQQLSRPRQPLLLQVSVQREHLGPLASGAHKLVRFASQGAPAGLGEPQLELHTLDLGDYGAQGDCDPEAPMTEGTRCCRQEMYIDLQGMKWAENWVLEPPGFLAYECVGTCRQPPEALAFKWPFLGPRQCIASETDSLPMIVSIKEGGRTRPQVVSLPNMRVQKCSCASDGALVPRRLQP

SEQ ID NO: 3065 - protein, 91 aa, Homo sapiens
WNSQKEVLERTRAELDTVCRHNYQLELRTTLQRRVEPTVTISPSRTEALNHHNLLVCSVTDFYPAQIKVRWFRNDQEETTGVVSTPLIKER

SEQ ID NO: 3066 - protein, 166 aa, Homo sapiens
  MISC_FEATURE (120): Xaa equals any of the twenty naturally occurring L-amino acids
  MISC_FEATURE (128): Xaa equals any of the twenty naturally occurring L-amino acids
GAGRPGAPTMASKCPKCDKTVYFAEKVSSLGKDWHKFCLKCERCSKTLTPGGHAEHDGKPFCHKPCYATLFGPKGVNIGGAGSYIYEKPLAEGPQVTGPIEVPAARAEERKASGPPKGPXRAFSVTTXTGEPNTCPRCSKKVYFAEKVTVSGQGLAPALPALRALR

SEQ ID NO: 3067 - protein, 402 aa, Homo sapiens
  MISC_FEATURE (188): Xaa equals any of the twenty naturally occurring L-amino acids
  MISC_FEATURE (196): Xaa equals any of the twenty naturally occurring L-amino acids
SGWTCPRTACTPCLPQTLRNLPKSLQVLRLRDNYLAFFKWWSLHFLPKLEVLDLAGNQLKALTNGSLPAGTRLRRLDVSCNSISFVAPGFFSKAKELRELNLSANALKTVDHSWFGPLASALQILDVSANPLHCACGAAFMDFLLEVQAAVPGLPSRVKCGSPGQLQGLSIFAQDLRLCLDEALSWDXFALSLLAXALGLGVPMLHHLCGWDLWYCFHLCLAWLPWRGRQSGRDEDALPYDAFVVFDKTQSAVADWVYNELRGQLEECRGRWALRLCLEERDWLPGKTLFENLWASVYGSRKTLFVLAHTDRVSGLLRASFLLAQQRLLEDRKDVVVLVILSPDGRRSRYVRLRQRLCRQSVLLWPHQPSGQRSFWAQLGMALTRDNHHFYNRNFCQGPTAE

SEQ ID NO: 3068 - protein, 342 aa, Homo sapiens
LIRLTIGKAGTPAGTGPEFPGRPTRPLFTARLRPGSPSLALFLSNGHFVAQMEGLGTRLRAQSRQRSRPGRWHKVSVRWEKNRILLVTDGARAWSQEGPHRQHQGAEHPQPHTLFVGGLPASSHSSKLPVTVGFSGCVKRLRLHGRPLGAPTRMAGVTPCILGPLEAGLFFPGSGGVITLDLPGATLPDVGLELEVRPLAVTGLIFHLGQARTPPYLQLQVTEKQVLLRADDGAGEFSTSVTRPSVLCDGQWHRLAVMKSGNVLRLEVDAQSNHTVGPLLAAAAGAPAPLYLGGLPEPMAVQPWPPAYCGCMRRLAVNRSPVAMTRSVEVHGAVGASGCPAA

SEQ ID NO: 3069 - protein, 63 aa, Homo sapiens
  MISC_FEATURE (3): Xaa equals any of the twenty naturally occurring L-amino acids
  MISC_FEATURE (13): Xaa equals any of the twenty naturally occurring L-amino acids
KLXQALQPQPPPXEPTPSPHPVLPAPPGPPGTDLRQLGEAPCPWPLSCCPPPLPPPPSFSALG

SEQ ID NO: 3070 - protein, 110 aa, Homo sapiens
  MISC_FEATURE (23): Xaa equals any of the twenty naturally occurring L-amino acids
  MISC_FEATURE (25): Xaa equals any of the twenty naturally occurring L-amino acids
  MISC_FEATURE (38): Xaa equals any of the twenty naturally occurring L-amino acids
  MISC_FEATURE (43): Xaa equals any of the twenty naturally occurring L-amino acids
DVYKETAITMVMRFWQYINGRGXRXDSRGFPSLHPIDXNGSLXWHQNQRDFPKCRNNSAPLTQMGGRRVRWEVYISRARLVNRQIAWRRHPRCFDLHRRHRDRSSLRTLA

SEQ ID NO: 3071 - protein, 81 aa, Homo sapiens
  MISC_FEATURE (7): Xaa equals any of the twenty naturally occurring L-amino acids
  MISC_FEATURE (56): Xaa equals any of the twenty naturally occurring L-amino acids
  MISC_FEATURE (71): Xaa equals any of the twenty naturally occurring L-amino acids
  MISC_FEATURE (78): Xaa equals any of the twenty naturally occurring L-amino acids
QKKKKKXSRGGPVPNSPYSESYYNSLAVVLQRRDWENPGVTQLNRLAAHPPFASWXNSEEARTDRPSQQLXSLNGKWXIVS

SEQ ID NO: 3072 - protein, 402 aa, Homo sapiens
KSYEMELEEGKAGSGLRQYYLSKIEELQLIVNDKSQNLRRLQAQRNELNAKVRLLREELQLLQEQGSYVGEVVRAMDKKKVLVKVHPEGKFVVDVDKNIDINDVTPNCRVALRNDSYTLHKILPNKVDPLVSLMMVEKVPDSTYEMIGGLDKQIKEIKEVIELPVKHPELFEALGIAQPKGVLLYGPPGTGKTLLARAVAHHTDCTFIRVSGSELVQKFIGEGARMVRELFVMAREHAPSIIFMDEIDSIGSSRLEGGSGGDSEVQRTMLELLNQLDGFEATKNIKVIMATNRIDILDSALLRPGRIDRKIEFPPPNEEARLDILKIHSRKMNLTRGINLRKIAELMPGASGAEVKGVCTEAGMYALRERRVHVTQEDFEMAVAKVMQKDSEKNMSIKKLWK

SEQ ID NO: 3073 - protein, 483 aa, Homo sapiens
  MISC_FEATURE (13): Xaa equals any of the twenty naturally occurring L-amino acids
  MISC_FEATURE (57): Xaa equals any of the twenty naturally occurring L-amino acids
  MISC_FEATURE (97): Xaa equals any of the twenty naturally occurring L-amino acids
  MISC_FEATURE (323): Xaa equals any of the twenty naturally occurring L-amino acids
  MISC_FEATURE (383): Xaa equals any of the twenty naturally occurring L-amino acids
  MISC_FEATURE (440): Xaa equals any of the twenty naturally occurring L-amino acids
  MISC_FEATURE (452): Xaa equals any of the twenty naturally occurring L-amino acids
  MISC_FEATURE (477): Xaa equals any of the twenty naturally occurring L-amino acids
  MISC_FEATURE (481): Xaa equals any of the twenty naturally occurring L-amino acids
GPPQDLVDPPGPXGNFPSPRGGSGVASMERAESSSTEPAKAIKPIDRKSVHQICSGXVVLSLSTAVKELVENSLDAGATNIDLKLKDYGVDLIEVSXNGCGVEEENFEGLTLKHHTSKIQEFADLTQVETFGFRGEALSSLCALSDVTISTCHASAKVGTRLMFDHNGKIIQKTPYPRPRGTTVSVQQLFSTLPVRHKEFQRNIKKEYAKMVQVLHAYCIISAGIRVSCTNQLGQGKRQPVVCTGGSPSIKENIGSVFGQKQLQSLIPFVQLPPSDSVCEEYGLSCSDALHNLFYISGFISQCTHGVGRSSTDRQFFFINRRXCDPAKVCRLVNEVYHMYNRHQYPFVVLNISVDSECVDINVTPDKRQILLQEEKLLLAVLXTSLIGMFDSDVNKLNVSQQPLLDVEGNLIKMHAADLEKPMVEKQDQSPSLRTGEEKXDVSISRLREAFXLRHTTENKPHSPKTPEPRRSPLGQXKGYXVF

SEQ ID NO: 3074 - protein, 155 aa, Homo sapiens
  MISC_FEATURE (24): Xaa equals any of the twenty naturally occurring L-amino acids
  MISC_FEATURE (50): Xaa equals any of the twenty naturally occurring L-amino acids
GLSSLAGVKVERQTFGEATKQPGXTFIAAKFDGILGMAYPRISVNNVLPXFDNLMQQKLVEKNIFSFYLNRDPGAQPGGELMLGGTDSKYYKGPLSYLNVTRKAYWQVHMEQVDVGSSLTLCKGGCEAIVDTGTSLIVGPVDEVRELQKPSGPCR

SEQ ID NO: 3075 - protein, 87 aa, Homo sapiens
  MISC_FEATURE (23): Xaa equals any of the twenty naturally occurring L-amino acids
RFDSRGFPSLHPIDVNGSLFWHXNQRDFPKCRNNSAPLTQMGGRRVRWEVYISRARLVNRQIAWRRHPRCFDLHRRHRDRSSLRTLA

SEQ ID NO: 3076 - protein, 51 aa, Homo sapiens
  MISC_FEATURE (1): Xaa equals any of the twenty naturally occurring L-amino acids
XFLRRSLALSPRLECSGSISAHCNLRLPGSSNSPVSSSQVAGTMGTHHQPG

SEQ ID NO: 3077 - protein, 592 aa, Homo sapiens
  MISC_FEATURE (9): Xaa equals any of the twenty naturally occurring L-amino acids
RHEGDPPPXPPDAGAAFWKVREGSEGLPLLHCGRPESGSIRPSRANPDTAEFAMPENVAPRSGATAGAAGGRGKGAYQDRDKPAQIRFSNISAAKAVADAIRTSLGPKGMDKMIQDGKGDVTITNDGATILKQMQVLHPAARMLVELSKAQDIEAGDGTTSVVIIAGSLLDSCTKLLQKGIHPTIISESFQKALEKGIEILTDMSRPVELSDRETLLNSATTSLNSKVVSQYSSLLSPMSVNAVMKVIDPATATSVDLRDIKIVKKLGGTIDDCELVEGLVLTQKVSNSGITRVEKAKIGLIQFCLSAPKTDMDNQIVVSDYAQMDRVLREERAYILNLVKQIKKTGCNVLLIQKSILRDALSDLALHFLNKMKIMVIKDIEREDIEFICKTIGTKPVAHIDQFTADMLGSAELAEEVNLNGSGKLLKITGCASPGKTVTIVVRGSNKLVIEEAERSIHDALCVIRCLVKKRALIAGGGAPEIELALRLTEYSRTLSGMESYCVRAFADAMEVIPSTLAENAGLNPISTVTELRNRHAQGEKTAGINVRKGGISNILEELVVQPLLVSVSALTLATETVRSILKIDDVVNTR

SEQ ID NO: 3078 - protein, 584 aa, Homo sapiens
  MISC_FEATURE (253): Xaa equals any of the twenty naturally occurring L-amino acids
  MISC_FEATURE (521): Xaa equals any of the twenty naturally occurring L-amino acids
  MISC_FEATURE (552): Xaa equals any of the twenty naturally occurring L-amino acids
NPGRRQAVRPLLRPAWAGVFLERQAGDPGPLYRMLCSLLLCECLLLVAGYAHDDDWIDPTDMLNYDAASGTMRKSQAKYGISGEKDVSPDLSCADEISECYHKLDSLTYKIDECEKKKREDYESQSNPVFRRYLNKILIEAGKLGLPDENKGDMHYDAEIILKRETLLEIQKFLNGEDWKPGALDDALSDILINFKFHDFETWKWRFEDSFGVDPYNVLMVLLCLLCIVVLVATELWTYVRWYTQLRRVLIIXFLFSLGWNWMYLYKLAFAQHQAEVAKMEPLNNVCAKKMDWTGSIWEWFRSSWTYKDDPCQKYYELLLVNPIWLVPPTKALAVTFTTFVTEPLKHIGKGTGEFIKALMKEIPALLHLPVLIIMALAILSFCYGAGKSVHVLRHIGGPEREPPQALRPRDRRRQEEIDYRPDGGAGDADFHYRGQMGPTEQGPYAKTYEGRREILRERDVDLRFQTGNKSPEVLRAFDVPDAEAREHPTVVPSHKSPVLDTKPKETGGILGEGTPKESSXESSQSAKPVSGQDTSGNTEGSPAAEKAQLKXEAAGSPDQGSTYSPARGVAGPRGQDPVSSPCG

SEQ ID NO: 3079 - protein, 85 aa, Homo sapiens
  MISC_FEATURE (47): Xaa equals any of the twenty naturally occurring L-amino acids
  MISC_FEATURE (64): Xaa equals any of the twenty naturally occurring L-amino acids
  MISC_FEATURE (66): Xaa equals any of the twenty naturally occurring L-amino acids
  MISC_FEATURE (67): Xaa equals any of the twenty naturally occurring L-amino acids
IIKCLPKKKKKGGRSRGSKLTYACMRRHSSSIVSPKFNSLAVVLQRXDWENPGVTQLNRLAAHXPXXSWRNSEEARTDRPSQQVA

SEQ ID NO: 3080 - protein, 119 aa, Homo sapiens
  MISC_FEATURE (110): Xaa equals any of the twenty naturally occurring L-amino acids
PTRPVSLRLAGAAKPRWLGGNGWLLDGPEEVLQAEACSTTEDGAEPLLCPSGYECHILSPGDVAEVSPTVGSASSSAGKQMGESYDTNFTKNIQKVTQRMWQNLEGDNRXTFSKATASS

SEQ ID NO: 3081 - protein, 439 aa, Homo sapiens
  MISC_FEATURE (175): Xaa equals any of the twenty naturally occurring L-amino acids
LKAGTPAGTGPEFPGRPTRPREVAHSRRAAGGGGPGGPGGSGDFLLIYLANLEAKSRQVAALLPPRGRRSANDELFRAGSRLRRQLAKLAIIFSHMHAELHALFPGGKYCGHMYQLTKAPAHTFWRESCGARCVLPWAEFESLLGTCHPVEPGCTALALRTTIDLTCSGHVSIFXFDVFTRLFQPWPTLLKNWQLLAVNHPGYMAFLTYDEVQERLQACRDKPGSYIFRPSCTRLGQWAIGYVSSDGSILQTIPANKPLSQVLLEGQKDGFYLYPDGKTHNPDLTELGQAEPQQRIHVSEEQLQLYWAMDSTFELCKICAESNKDVKIEPCGHLLCSCCLAAWQHSDSQTCPFCRCEIKGWEAVSIYQFHGQATAEDSGNSSDQEGRELELGQVPLSAPPLPPRPDLPPRKPRNAQPKVRLLKGNSPPAALGPQDPAPA

SEQ ID NO: 3082 - protein, 104 aa, Homo sapiens
GTGRGGNSIWGKKFEDEYSEYLKHNVRGVVSMANNGPNTNGSQFFITYGKQPHLDMKYTVFGKVIDGLETLDELEKLPVNEKTYRPLNDVHIKDITIHANPFAQ

SEQ ID NO: 3083 - protein, 270 aa, Homo sapiens
SRDPNGWWRRLRVSAELAMAQLCGLRRSRAFLALLGSLLLSGVLAADRERSIHDFCLVSKVVGRCRASMPRWWYNVTDGSCQLFVYGGCDGNSNNYLTKEECLKKCATVTENATGDLATSRNAADSSVPSAPRRQDSEDHSSDMFNYEEYCTANAVTGPCRASFPRWYFDVERNSCNNFIYGGCRGNKNSYRSEEACMLRCFRQQENPPLPLGSKVVVLAGLFVMVLILFLGASMVYLIRVARRNQERALRTVWSSGDDKEQLVKNTYVL

SEQ ID NO: 3084 - protein, 510 aa, Homo sapiens
CYSYSPCWRSLSDSLSLSASSAGLFQTSASPNQVTFQPRPTLRQSPEADRGRRAEDSRVRFASSGVGGRTLKYCRSQDPPGRTQTTMRAPGCGRLVLPLLLLAAAALAEGDAKGLKEGETPGNFMEDEQWLSSISQYSGKIKHWNRFRDEVEDDYIKSWEDNQQGDEALDTTKDPCQKVKCSRHKVCIAQGYQRAMCISRKKLEHRIKQPTVKLHGNKDSICKPCHMAQLASVCGSDGHTYSSVCKLEQQACLSSKQLAVRCEGPCPCPTEQAATSTADGKPETCTGQDLADLGDRLRDWFQLLHENSKQNGSASSVAGPASGLDKSLGASCKDSIGWMFSKLDTSADLFLDQTELAAINLDKYEVCIRPFFNSCDTYKDGRVSTAEWCFCFWREKPPCLAELERIQIQEAAKKKPGIFIPSCDEDGYYRKMQCDQSSGDCWCVDQLGLELTGTRTHGSPDCDDIVGFSGDFGSGVGWEDEEEKETEEAGEEAEEEEGEAGEADDGGYIW

SEQ ID NO: 3085 - protein, 228 aa, Homo sapiens
  MISC_FEATURE (1): Xaa equals any of the twenty naturally occurring L-amino acids
XAVVLDEGSASVAELRPDSPAHVLLAALLHETRAGPTAVYFLRGGFDGFQGCCPDLCSEAPAPALPPTGDKTSRSDSRAPVYDQGGPVEILPYLFLGSCSHSSDLQGLQACGITAVLNVSASCPNHFEGLFRYKSIPVEDNQMVEISAWFQEAIGFIDWVKNSGGRVLVHCQAGISRSATICLAYLMQSRRVRLDEAFDFVKQRRGVISPNFSFMGQLLQFETQVLCH

SEQ ID NO: 3086 - protein, 621 aa, Homo sapiens
SLSSLPAQTSCTSSFPAPPSSPEAPRMVRWFHRDLSGLDAETLLKGRGVHGSFLARPSRKNQGDFSLSVRVGDQVTHIRIQNSGDFYDLYGGEKFATLTELVEYYTQQQGVLQDRDGTIIHLKYPLNCSDPTSERWYHGHMSGGQAETLLQAKGEPWTFLVRESLSQPGDFVLSVLSDQPKAGPGSPLRVTHIKVMCEGGRYTVGGLETFDSLTDLVEHFKKTGIEEASGAFVYLRQPYYATRVNAADIENRVLELNKKQESEDTAKAGFWEEFESLQKQEVKNLHQRLEGQRPENKGKNRYKNILPFDHSRVILQGRDSNIPGSDYINANYIKNQLLGPDENAKTYIASQGCLEATVNDFWQMAWQENSRVIVMTTREVEKGRNKCVPYWPEVGMQRAYGPYSVTNCGEHDTTEYKLRTLQVSPLDNGDLIREIWHYQYLSWPDHGVPSEPGGVLSFLDQINQRQESLPHAGPIIVHCSAGIGRTGTIIVIDMLMENISTKGLDCDIDIQKTIQMVRAQRSGMVQTEAQYKFIYVAIAQFIETTKKKLEVLQSQKGQESEYGNITYPPAMKNAHAKASRTSSKHKEDVYENLHTKNKREEKVKKQRSADKEKSKGSLKRK

SEQ ID NO: 3087 - protein, 270 aa, Homo sapiens
NSTFEDHSHLLYSTIPRMQEPGQIVETYTEEDPEGAMSVVSVETSDDGTTRRTETTVKKVVKTVTTRTVQPVAMGPDGLPVDASSVSNNYIQTLGRDFRKNGNGGPGPYVGQAGTATLPRNFHYPPDGYSRHYEDGYPGGSDNYGSLSRVTRIEERYRPSMEGYRAPSRQDVYGPQPQVRVGGSSVDLHRFHPEPYGLEDDQRSMGYDDLDYGMMSDYGTARRTGTPSDPRRRLRSYEDMIGEEVPSDQYYWAPLAQHERGSLASLDSLR

SEQ ID NO: 3088 - protein, 360 aa, Homo sapiens
  MISC_FEATURE (344): Xaa equals any of the twenty naturally occurring L-amino acids
GSTHASAPRPANLAIQPPLSPLRALAPLPEKPGAVPPPQKRMAKVAKDLNPGVKKMSLGQLQSARGVACLGCKGTCSGFEPHSWRKICKSCKCSQEDHCLTSDLEDDRKIGRLLMDSKYSTLTARVKGGDGIRIYKRNRMIMTNPIATGKDPTFDTITYEWAPPGVTQKLGLQYMELIPKEKQPVTGTEGAFYRRRQLMHQLPIYDQDPSRCRGLLENELKLMEEFVKQYKSEALGVGEVALPGQGGLPKEEGKQQEKPEGAETTAATTNGSLSDPSKEVEYVCELCKGAAPPDSPVVYSDRAGYNKQWHPTCFVCAKCSEPLVDLIYFWKDGAPWCGRSRGSXLTYACMRRHSSSIVSP

SEQ ID NO: 3089 - protein, 97 aa, Homo sapiens
  MISC_FEATURE (23): Xaa equals any of the twenty naturally occurring L-amino acids
  MISC_FEATURE (60): Xaa equals any of the twenty naturally occurring L-amino acids
  MISC_FEATURE (62): Xaa equals any of the twenty naturally occurring L-amino acids
LGLYFLLRKFISCFIRCVWFQRXMAVVIRLQGLPIVAGTMDIRHFFSGLTIPDGGVHIVXGXLGEAFIVFATDEDARLGMMRTGGTIKGSKVTLLLS

SEQ ID NO: 3090 - protein, 420 aa, Homo sapiens
ILTAELLEDLGPWVAGIMDRSKENCISGPVKATAPVGGPKRVLVTQQFPCQNPLPVNSGQAQRVLCPSNSSQRVPLQAQKLVSSHKPVQNQKQKQLQATSVPHPVSRPLNNTQKSKQPLPSAPENNPEEELASKQKNEESKKRQWALEDFEIGRPLGKGKFGNVYLAREKQSKFILALKVLFKAQLEKAGVEHQLRREVEIQSHLRHPNILRLYGYFHDATRVYLILEYAPLGTVYRELQKLSKFDEQRTATYITELANALSYCHSKRVIHRDIKPENLLLGSAGELKIADFGWSVHAPSSRRTTLCGTLDYLPPEMIEGRMHDEKVDLWSLGVLCYEFLVGKPPFEANTYQETYKRISRVEFTFPDFVTEGARDLISRLLKHNPSQRPMLREVLEHPWITANSSKPSNCQNKESASKQS

SEQ ID NO: 3091 - protein, 311 aa, Homo sapiens
AEGLASPLLRAGPNPVAAAALRVPIPERPPEDNQSFQYDHEAFLGKEDSKTFDQLTPDESKERLGKIVDRIDNDGDGFVTTEELKTWIKRVQKRYIFDNVAKVWKDYDRDKDDKISWEEYKQATYGYYLGNPAEFHDSSDHHTFKKMLPRDERRFKAADLNGDLTATREEFTAFLHPEEFEHMKEIVVLETLEDIDKNGDGFVDQDEYIADMFSHEENGPEPDWVLSEREQFNEFRDLNKDGKLDKDEIRHWILPQDYDHAQAEARHLVYESDKNKDEKLTKEEILENWNMFVGSQATNYGEDLTKNHDEL

SEQ ID NO: 3092 - protein, 260 aa, Homo sapiens
  MISC_FEATURE (10): Xaa equals any of the twenty naturally occurring L-amino acids
  MISC_FEATURE (36): Xaa equals any of the twenty naturally occurring L-amino acids
  MISC_FEATURE (39): Xaa equals any of the twenty naturally occurring L-amino acids
  MISC_FEATURE (48): Xaa equals any of the twenty naturally occurring L-amino acids
  MISC_FEATURE (73): Xaa equals any of the twenty naturally occurring L-amino acids
  MISC_FEATURE (82): Xaa equals any of the twenty naturally occurring L-amino acids
PQVIHLPWTXKVLGLQVQMLISVVWIKRCQEAQNGXESXVWTHQSKIXCSILACSAYVALALGDNLMALNHAXKLLQQPKLXGSLKFLGHLYAAEALISLDRISDAITHLNPENVTDVSLGISSNEQDQGSDKGENEAMESSGKRAPQCYPSSVNSARTVMLFNLGSAYCLRSEYDKARKCLHQAASMIHPKEVPPEAILLAVYLELQNGNTQLALQIIKRNQLLPAVKTHSEVRKKPVFQPVHPIQPIQMPAFTTVQRK

SEQ ID NO: 3093 - protein, 344 aa, Homo sapiens
QLRRQQQRLRGMAAAAAGTATSQRFFQSFSDALIDEDPQAALEELTKALEQKPDDAQYYCQRAYCHILLGNYCVAVADAKKSLELNPNNSTAMLRKGICEYHEKNYAAALETFTEGQKLDSADANFSVWIKRCQEAQNGSESEVWTHQSKIKYDWYQTESQVVITLMIKNVQKNDVNVEFSEKELSALVKLPSGEDYNLKLELLHPIIPEQSTFKVLSTKIEIKLKKPEAVRWEKLEGQGDVPTPKQFVADVKNLYPSSSPYTRNWDKLVGEIKEEEKNEKLEGDAALNRLFQQIYSDGSDEVKRAMNKSFMESGGTVLSTNWSDVGKRKVEINPPDDMEWKKY

SEQ ID NO: 3094 - protein, 88 aa, Homo sapiens
RRHTVAHRPRQTLDALLPPDTSPEALDLLRRLLVFAPDKRLSATQALQHPYVQRFHCPSDEWAREADVRPRAHEGVQLSVPEYRSRVY

SEQ ID NO: 3095 - protein, 63 aa, Homo sapiens
LDEEISGIVEVVGRVTAKATILCTSYVQFKEDSHPFDLGLYNEAVKIIHDFPQFYPLGIVQHD

SEQ ID NO: 3096 - protein, 33 aa, Homo sapiens
KKNNHTIPYNPATAFLGFSPSKIKTYAYKFMCT

SEQ ID NO: 3097 - protein, 504 aa, Homo sapiens
  MISC_FEATURE (25): Xaa equals any of the twenty naturally occurring L-amino acids
  MISC_FEATURE (90): Xaa equals any of the twenty naturally occurring L-amino acids
  MISC_FEATURE (135): Xaa equals any of the twenty naturally occurring L-amino acids
  MISC_FEATURE (219): Xaa equals any of the twenty naturally occurring L-amino acids
  MISC_FEATURE (299): Xaa equals any of the twenty naturally occurring L-amino acids
  MISC_FEATURE (360): Xaa equals any of the twenty naturally occurring L-amino acids
  MISC_FEATURE (379): Xaa equals any of the twenty naturally occurring L-amino acids
  MISC_FEATURE (422): Xaa equals any of the twenty naturally occurring L-amino acids
VRTRSAGGLGAAGLGPSGSGRAEAXAGASGRAARRHHDSCEDAALPGRSDLCRAPHPARPAARGGRPADGGCLQYLQKVSGDIFSRISQXVEQSRSQVQAIGEKVSLAQAKIEKIKGSKKAIKVFSSAKYPAPEXLQEYGSIFTGAQDPGLQRRPRHRIQSKHRPLDERALQEKLKDFPVCVSTKPEPEDDAEEGLGGLPSNISSVSSLLLFNTTENLXKKYVFLDPLAGAVTKTHVMLGAETEEKLFDAPLSISKREQLEQQVPENYFYVPDLGQVPEIDVPSYLPDLPGIANDLMYXADLGPGIAPSAPGTIPELPTFHTEVAEPLKADLQDGVLTAPPPPPPPPPPPPAPEVLASAXPLPPSTAAPVGQGARQDDXSSSASPSVQGAPREVVDPSGGRATLLESIRQAGGIGKAKLRSXKERKLEKKKQKEQEQVRATSQGGHLMSDLFNKLVMRRKGISGKGPGAGEGPGGAFARVSDSIPPLPPPQQPQAEEDEDDWES

SEQ ID NO: 3098 - protein, 198 aa, Homo sapiens
  MISC_FEATURE (193): Xaa equals any of the twenty naturally occurring L-amino acids
  MISC_FEATURE (194): Xaa equals any of the twenty naturally occurring L-amino acids
  MISC_FEATURE (196): Xaa equals any of the twenty naturally occurring L-amino acids
GRLWACWGWGPEAPEMAAQRGMPSSAVRVLEEALGMGLTAAGDARDTADAVAAEGAYYLEQVTITEASEDDYEYEEIPDDNFSIPEGEEDLAKAIQMAQEQATDTEILERKTVLPSKHAVPEVIEDFLCNFLIKMGMTRTLDCFQSEWYELIQKGVTELRTVGNVPDVYTQIMLLENENKNLKKDLKHYKQAXXYXIF

SEQ ID NO: 3099 - protein, 25 aa, Homo sapiens
HLLISKLQCKRKNIFKKYSYFSLWK

SEQ ID NO: 3100 - protein, 28 aa, Homo sapiens
  MISC_FEATURE (3): Xaa equals any of the twenty naturally occurring L-amino acids
TAXAVVTARTCLLLNTAHPECEVNLTLR

SEQ ID NO: 3101 - protein, 206 aa, Homo sapiens
AAMLVAAAAERNKDPILHVLRQYLDPAQRGVRVLEVASGSGQHAAHFARAFPLAEWQPSDVDQRCLDSIAATTQAQGLTNVKAPLHLDVTWGWEHWGGILPQSLDLLLCINMAHVSPLRCTEGLFRAAGHLLKPRALLITYGPYAINGKISPQSNVDFDLMLRCRNPEWGLRDTALLEDLGKASGLLLERMVDMPANNKCLIFRKN

SEQ ID NO: 3102 - protein, 103 aa, Homo sapiens
EPQEVQCSCDPGQGLLIIVGNPLLLGHDPDWKVFLEFCKENGGYTGCPFPAKLDLQQGQNLLQGLSKLSPSTSGPHSHDYLPQEREGEGGLSLQVEPEWRNEL

SEQ ID NO: 3103 - protein, 153 aa, Homo sapiens
  MISC_FEATURE (95): Xaa equals any of the twenty naturally occurring L-amino acids
  MISC_FEATURE (99): Xaa equals any of the twenty naturally occurring L-amino acids
RSERRALGVPDPPGRRLCLCLRYGSAAVATRSQRTLLRFPLDGVGGEKRGFRRPPRWWPSAARRLLWPAPPPFRVGGGSRRARPREAPRPAVRPXRGLXALYLTYLVDPASSICLSQRLSHACLSTHGRYSETANGSLNQLWFLWSLAPLLLG

SEQ ID NO: 3104 - protein, 434 aa, Homo sapiens
  MISC_FEATURE (86): Xaa equals any of the twenty naturally occurring L-amino acids
QYRSGNSRVDPRVRSASCRRLRGGGGPGTPGRGGALLASLLPPCRTPPDPPAGPRRCTRPLLSPPGKLSAPPRPSPVIRRGSSPAXPPQGLLPTSRPAAPATAGSRNMSTTLLSAFYDVDFLCKTEKSLANLNLNNMLDKKAVGTPVAAAPSSGFAPGFLRRHSASNLHALAHPAPSPGSCSPKFPGAANGSSCGSAAAGGPTSYGTLKEPSGGGGTALLNKENKFRDRSFSENGDRSQHLLHLQQQQKGGGGSQINSTRYKTELCRPFEESGTCKYGEKCQFAHGFHELRSLTRHPKYKTELCRTFHTIGFCPYGPRCHFIHNADERRPAPSGGASGDLRAFGTRDALHLGFPREPRPKLHHSLSFSGFPSGHHQPPGGLESPLLLDSPTSRTPPPPSCSSASSCSSSASSCSSASAASTPSGAPTCCASAAA

SEQ ID NO: 3105 - protein, 78 aa, Homo sapiens
  MISC_FEATURE (3): Xaa equals any of the twenty naturally occurring L-amino acids
PTXPSMRRILDSAEFIKFTVIRPFPGLVINNQLVDQSESEGPVIQESAEPSQLEVPATEEIKETDGSSQIKQEPDPTW

SEQ ID NO: 3106 - protein, 928 aa, Homo sapiens
HEGKRAVRAGARAGPAVAAEMEEGGRDKAPVQPQQSPAAAPGGTDEKPSGKERRDAGDKDKEQELSEEDKQLQDELEMLVERLGEKDTSLYRPALEELRRQIRSSTTSMTSVPKPLKFLRPHYGKLKEIYENMAPGENKRFAADIISVLAMTMSGERECLKYRLVGSQEELASWGHEYVRHLAGEVAKEWQELDDAEKVQREPLLTLVKEIVPYNMAHNAEHEACDLLMEIEQVDMLEKDIDENAYAKVCLYLTSCVNYVPEPENSALLRCALGVFRKFSRFPEALRLALMLNDMELVEDIFTSCKDVVVQKQMAFMLGRHGVFLELSEDVEEYEDLTEIMSNVQLNSNFLALARELDIMEPKVPDDIYKTHLENNRFGGSGSQVDSARMNLASSFVNGFVNAAFGQDKLLTDDGNKWLYKNKDHGMLSAAASLGMILLWDVDGGLTQIDKYLYSSEDYIKSGALLACGIVNSGVRNECDPALALLSDYVLHNSNTMRLGSIFGLGLAYAGSNREDVLTLLLPVMGDSKSSMEVAGVTALACGMIAVGSCNGDVTSTILQTIMEKSETELKDTYARWLPLGLGLNHLGKGEAIEAILAALEVVSEPFRSFANTLVDVCAYAGSGNVLKVQQLLHICSEHFDSKEKEEDKDKKEKKDKDKKEAPADMGAHQGVAVLGIALIAMGEEIGAEMALRTFGHLLRYGEPTLRRAVPLALALISVSNPRLNILDTLSKFSHDADPEVSYNSIFAMGMVGSGTNNARLAAMLRQLAQYHAKDPNNLFMVRLAQGLTHLGKGTLTLCPYHSDRQLMSQVAVAGLLTVLVSFLDVRNIILGKSHYVLYGLVAAMQPRMLVTFDEELRPLPVSVRVGQAVDVVGQAGKPKTITGFQTHTTPVLLAHGERAELATEEFLPVTPILEGFVILRKNPNYDL

SEQ ID NO: 3107 - protein, 265 aa, Homo sapiens
HSPVPQSLPARCAAAEAMRLIQNMCTIAEYPAPGNAAASDCCVGAAGRRLVKIAVVGASGVGKTALVVRFLTKRFIGDYERNAGNLYTRQVQIEGETLALQVQDTPGIQVHENSLSCSEQLNRCIRWADAVVIVFSITDYKSYELISQLHQHVQQLHLGTRLPVVVVANKADLLHIKQVDPQLGLQLASMLGCSFYEVSVSENYNDVYSAFHVLCKEVSHKQQPSSTPEKRRTSLIPRPKSPNMQDLKRRFKQALSAKVRTVTSV

SEQ ID NO: 3108 - protein, 617 aa, Homo sapiens
  MISC_FEATURE (64): Xaa equals any of the twenty naturally occurring L-amino acids
EMEKGVGMILFLVRPRITIINLTVQYERMGRGPGPLQERSLFEKKRGAPPSSNIEDFHGLLPKXYPHLCSICDLPVHSNKEWSQHINGASHSRRCQLLLEIYPEWNPDNDTGHTMGDPFMLQQSTNPAPGILGPPPPSFHLGGPAVGPRGNLGAGNGNLQGPRHMQKGRVETSRVVHIMDFQRGKNLRYQLLQLVEPFGVISNHLILNKINEAFIEMATTEDAQAAVDYYTTTPALVFGKPVRVHLSQKYKRIKKPEGKPDQKFDQKQELGRVIHLSNLPHSGYSDSAVLKLAEPYGKIKNYILMRMKSQAFIEMETREDAMAMVDHCLKKALWFQGRCVKVDLSEKYKKLVLRIPNRGIDLLKKDKSRKRSYSPDGKESPSDKKSKTDGSQKTESSTEGKEQEEKSGEDGEKDTKDDQTEQEPNMLLESEDELLVDEEEAAALLESGSSVGDETDLANLGDVASDGKKEPSDKAVKKDGSASAAAKKKLKKRRFPGSMEGFVTLDEVGDEEDSELQKLRKSGMAFKSGDKNDDGLVEIKVDKIEELDQENEAALGNGIKNEENTEPGAESSENADDPNKDTSENADGQSDENKDDYTIPDEYRIGPYQPNVPVGEI

SEQ ID NO: 3109 - protein, 209 aa, Homo sapiens
PLAPRAAAKTASTAVGRTHRELQKEVDQREALKKMKDVYEKTPQMGDPASLEPQIAETLSNIERLKLEVQKYEAWLAEAESRVLSNRGDSLSRHARPPDPPASAPPDSSSNSASQDTKESSEEPPSEESQDTPIYTEFDEDFEEEPTSPIGHCVAIYHFEGSSEGTISMAEGEDLSLMEEDKGDGWTRVRRKEGGEGYVPTSYLRVTLN

SEQ ID NO: 3110 - protein, 166 aa, Homo sapiens
MAQRLLLRRFLASVISRKPSQGQWPPLTSRALQTPQCSPGGLTVTPNPARTIYTTRISLTTFNIQDGPDFQDRVVNSETPVVVDFHAQWCGPCKILGPRLEKMVAKQHGKVVMAKVDIDDHTDLAIEYEVSAVPTVLAMKNGDVVDKFVGIKDEDQLEAFLKKLIG

SEQ ID NO: 3111 - protein, 198 aa, Homo sapiens
ILAARMGKQNSKLRPEVMQDLLESTDFTEHEIQEWYKGFLRDCPSGHLSMEEFKKIYGNFFPYGDASKFAEHVFRTFDANGDGTIDFREFIIALSVTSRGKLEQKLKWAFSMYDLDGNGYISKAEMLEIVQAIYKMVSSVMKMPEDESTPEKRTEKIFRQMDTNRDGKLSLEEFIRGAKSDPSIVRLLQCDPSSAGQF

SEQ ID NO: 3112 - protein, 326 aa, Homo sapiens
APQADRGQRRWHVGQAQQGPVSALSRALPAPARTMRALEGPGLSLLCLVLALPALLPVPAVRGVAETPTYPWRDAETGERLVCAQCPPGTFVQRPCRRDSPTTCGPCPPRHYTQFWNYLERCRYCNVLCGEREEEARACHATHNRACRCRTGFFAHAGFCLEHASCPPGAGVIAPGTPSQNTQCQPCPPGTFSASSSSSEQCQPHRNCTALGLALNVPGSSSHDTLCTSCTGFPLSTRVPGAEECERAVIDFVAFQDISIKRLQRLLQALEAPEGWGPTPRAGRAALQLKLRRRLTELLGAQDGALLVRLLQAARGQDARAGAERP

SEQ ID NO: 3113 - protein, 111 aa, Homo sapiens
DRSCSKMLIRQNLALDCKQKKSRSRSGSKKKMLTLPHGADEVYILRCRFCGLVFRGPLSVQEDWIKHLQRHIVNANLPRTGAGMVEVTSLLKKPASITETSFSLLMAEAAS

SEQ ID NO: 3114 - protein, 64 aa, Homo sapiens
  MISC_FEATURE (50): Xaa equals any of the twenty naturally occurring L-amino acids
AGVQWRDLGSLQPLPPRFKLFSSLNLPSNWDYRHAPPHPASFCIFSRDGXSPCWPGWSRTPDLK

SEQ ID NO: 3115 - protein, 112 aa, Homo sapiens
AAQAAGEEAPPGVRSVKVVLVGDGGCGKTSLLMVFADGAFPESYTPTVFERYMVNLQVKGKPVHLHIWDTAGQDDYDRLRPLFYPDASVLLLCFDVTSPNSFDNIFNRVLAL

SEQ ID NO: 3116 - protein, 178 aa, Homo sapiens
QLLDKHSAAGFAMAAIPPDSWQPPNVYLETSMGIIVLELYWKHAPKTCKNFAELARRGYYNGTKFHRIIKDFMIQGGDPTGTGRGGASIYGKQFEDELHPDLKFTGAGILAMANAGPDTNGSQFFVTLAPTQWLDGKHTIFGRVCQGIGMVNRVGMVETNSQDRPVDDVKIIKAYPSG

SEQ ID NO: 3117 - protein, 68 aa, Homo sapiens
LYGCEKTTEGRDEYDDLSDLNAVQMESVREWEMQFKEKYDYVGRLLKPGEEPSEYTDEEDTKDHNKQD

SEQ ID NO: 3118 - protein, 543 aa, Homo sapiens
GFTSRAGHFEPLHGAAAVPPLIPSSQHKPEALPSNTKPLPPPPTQTEEEEDPAMKPQSVLTRVKMFENKRSASLETKKDVNDTGSFKPPEVASKPSGAPIIGPKPTSQNQFSEHDKTLYRIPEPQKPQLKPPEDIVRSNHYDPEEDEEYYRKQLSYFDRRSFENKPPAHIAASHLSEPAKPAHSQNQSNFSSYSSKGKPPEADGVDRSFGEKRYEPIQATPPPPPLPSQYAQPSQPVTSASLHIHSKGAHGEGNSVSLDFQNSLVSKPDPPPSQNKPATFRPPNREDTAQAAFYPQKSFPDKAPVNGTEQTQKTVTPAYNRFTPKPYTSSARPFERKFESPKFNHNLLPSETAHKPDLSSKTPTSPKTLVKSHSLAQPPEFDSGVETFSIHAEKPKYQINNISTVPKAIPVSPSAVEEDEDEDGHTVVATARGIFNSNGGVLSSIETGVSIIIPQGAIPEGVEQEIYFKVCRDNSILPPLDKEKGETLLSPLVMCGPHGLKFLKPVELRLPHCDPKTWQNKCLPGDPNYLVGANCVSVLIDHF

SEQ ID NO: 3119 - protein, 519 aa, Homo sapiens
VVVIIQDKDGDRAVHHAAFGDEGAVIEVLHRGSADLNARNKRRQTPLHIAVNKGHLQVVKTLLDFGCHPSLQDSEGDTPLHDAISKKRDDILAVLLEAGADVTITNNNGFNALHHAALRGNPSAMRVLLSKLPRPWIVDEKKDDGYTALHLAALNNHVEVAELLVHQGNANLDIQNVNQQTALHLAVERQHTQIVRLLVRAGAKLDIQDKDGDTPLHEALRHHTLSQLRQLQDMQDVGKVDAAWEPSKNTLIMGLGTQGAEKKSAASIACFLAANGADLSIRNKKGQSPLDLCPDPNLCKALAKCHKEKVSGQVGSRSPSMISNDSETLEECMVCSDMKRDTLFGPCGHIATCSLCSPRVKKCLICKEQVQSRTKIEECVVCSDKKAAVLFQPCGHMCACENCANLMKKCVQCRAVVERRVPFIMCCGGKSSEDATDDISSGNIPVLQKDKDNTNVNADVQKLQQQLQDIKEQTMCPVCLDRLKNMIFLCGHGTCQLCGDRMSECPICRKAIERRILLY

SEQ ID NO: 3120 - protein, 433 aa, Homo sapiens
QLSIDTRPFRPASEGNPSDDPEPLPAHRQALGERLYPRVQAMQPAFASKITGMLLELSPAQLLLLLASEDSLRARVDEAMELIIAHGRENGADSILDLGLVDSSEKVQQENRKRHGSSRSVVDMDLDDTDDGDDNAPLFYQPGKRGFYTPRPGKNTEARLNCFRNIGRILGLCLLQNELCPITLNRHVIKVLLGRKVNWHDFAFFDPVMYESLRQLILASQSSDADAVFSAMDLAFAIDLCKEEGGGQVELIPNGVNIPVTPQNVYEYVRKYAEHRMLVVAEQPLHAMRKGLLDVLPKNSLEDLTAEDFRLLVNGCGEVNVQMLISFTSFNDESGENAEKLLQFKRWFWSIVEKMSMTERQDLVYFWTSSPSLPASEEGFQPMPSITIRPPDDQHLPTANTCISRLYVPLYSSKQILKQKLLLAIKTKNFGFV

SEQ ID NO: 3121 - protein, 317 aa, Homo sapiens
  MISC_FEATURE (39): Xaa equals any of the twenty naturally occurring L-amino acids
  MISC_FEATURE (50): Xaa equals any of the twenty naturally occurring L-amino acids
  MISC_FEATURE (58): Xaa equals any of the twenty naturally occurring L-amino acids
TVPGYVCLCNPGFHYDASHKKCEDHDECQDLACENGECXNTEGSFHCFCXPPLTLDLXQQRCMNSTSSTEDLPDHDIHMDICWKKVTNDVCSEPLRGHRTTYTECCCQDGEAWSQQCALCPPRSSEVYAQLCNVARIEAEREAGVHFRPGYEYGPGPDDLHYSIYGPDGAPFYNYLGPEDTVPEPAFPNTAGHSADRTPILESPLQPSELQPHYVASHPEPPAGFEGLQAEECGILNGCENGRCVRVREGYTCDCFEGFQLDAAHMACVDVNECDDLNGPAVLCVHGYCENTEGSYRCHCSPGYVAEAGPPHCTAKE

SEQ ID NO: 3122 - protein, 271 aa, Homo sapiens
  MISC_FEATURE (266): Xaa equals any of the twenty naturally occurring L-amino acids
RHRACGAPAAGAGDWRKPRVCGAAVACEQRDPGTESQPRRCCRRRRPETAEPVRPPPPPTPDTEHPVMDKNELVQKAKLAEQAERYDDMAACMKSVTEQGAELSNEERNLLSVAYKNVVGARRSSWRVVSSIEQKTEGAEKKQQMAREYREKIETELRDICNDVLSLLEKFLIPNASQAESKVFYLKMKGDYYRYLAEVAAGDDKKGIVDQSQQAYQEAFEISKKEMQPTHPIRLGLALNFSVFYYEILNSPEKACSLAKTAFDEXIAELD

SEQ ID NO: 3123 - protein, 505 aa, Homo sapiens
  MISC_FEATURE (131): Xaa equals any of the twenty naturally occurring L-amino acids
  MISC_FEATURE (132): Xaa equals any of the twenty naturally occurring L-amino acids
  MISC_FEATURE (172): Xaa equals any of the twenty naturally occurring L-amino acids
  MISC_FEATURE (173): Xaa equals any of the twenty naturally occurring L-amino acids
  MISC_FEATURE (176): Xaa equals any of the twenty naturally occurring L-amino acids
EPHASADAWASEGDAVAAAGDEPAGHGRHAGGAVGAAGDGGPELRHLPGDDGGSQPWPCVPTGGQRAEPIPGLPVTSGACRRCVHGELQPRHTPARPTAAPQCCPTILCAPCTTLRGPAPTCVPLSPRPTXXIISRLFGTSPATEAAPPPPEPVPAAQGPATVQSVEDFVPXXRLXRSFLEDTTPARDEKKVGAKAAQQDSDSDGEALGGNPMVAGFQDDVDLEDQPRGSPPLPAGPVPSQDITLSSEEEAEVAAPTKGPAPAPQQCSEPETKWSSIPASKPRRGTAPTRTAAPPWPGGVSVRTGPEKRSSTRPPAEMEPGKGEQASSSESDPEGPIAAQMLSFVMDDPDFESEGSDTQRRADDFPVRDDPSDVTDEDEGPAEPPPPPKLPLPAFRLKNDSDLFGLGLEEAGPKESSEEGKEGKTPSKEKKKKKKKGKEEEEKAAKKKSKHKKSKDKEEGKEERRRRQQRPPRSRERTAADELEAFLGGGAPGGRHPGGGDYEEL

SEQ ID NO: 3124 - protein, 753 aa, Homo sapiens
  MISC_FEATURE (33): Xaa equals any of the twenty naturally occurring L-amino acids
AVTWCRVSSLRPLPASPYIRLRRALSLAQVDRXGASRHQRQGCEDHGRLGRVTAPRGWQRAVRGGKATMELLRTITYQPAASTKMCEQALGKGCGADSKKKRPPQPPEESQPPQSQAQVPPAAPHHHHHHSHSGPEISRIIVDPTTGKRYCRGKVLGKGGFAKCYEMTDLTNNKVYAAKIIPHSRVAKPHQREKIDKEIELHRILHHKHVVQFYHYFEDKENIYILLEYCSRRSMAHILKARKVLTEPEVRYYLRQIVSGLKYLHEQEILHRDLKLGNFFINEAMELKVGDFGLAARLEPLEHRRRTICGTPNYLSPEVLNKQGHGCESDIWALGCVMYTMLLGRPPFETTNLKETYRCIREARYTMPSSLLAPAKHLIASMLSKNPEDRPSLDDIIRHDFFLQGFTPDRLSSSCCHTVPDFHLSSPAKNFFKKAAAALFGGKKDKARYIDTHNRVSKEDEDIYKLRHDLKKTSITQQPSKHRTDEELQPPTTTVARSGTPAVENKQQIGDAIRMIVRGTLGSCSSSSECLEDSTMGSVADTVARVLRGCLENMPEADCIPKEQLSTSFQWVTKWVDYSNKYGFGYQLSDHTVGVLFNNGAHMSLLPDKKTVHYYAELGQCSVFPATDAPEQFISQVTVLKYFSHYMEENLMDGGDLPSVTDIRRPRLYLLQWLKSDKALMMLFNDGTFQVNFYHDHTKIIICSQNEEYLLTYINEDRISTTFRLTTLLMSGCSSELKNRMEYALNMLLQRCN

SEQ ID NO: 3125 - protein, 285 aa, Homo sapiens
RKSSSVHNAASGLLGSRAPGRHRHLGRCRCRHRLVSPSPAMAEDLSAATSYTEDDFYCPVCQEVLKTPVRTTACQHVFCRKCFLTAMRESGAHCPLCRGNVTRRERACPERALDLENIMRKFSGSCRCCAKQIKFYRMRHHYKSCKKYQDEYGVSSIIPNFQISQDSVGNSNRSETSTSDNTETYQENTSSSGHPTFKCPLCQESNFTRQRLLDHCNSNHLFQIVPVTCPICVSLPWGDPSQITRNFVSHLNQRHQFDYGEFVNLQLDEETQYQTAVEESFQVNI

SEQ ID NO: 3126 - protein, 394 aa, Homo sapiens
RSNTTTIGKAGTPAGTGPEFPGRPTRPLIARCDGVSDCKDGEDEYRCVRVGGQNAVLQVFTAASWKTMCSDDWKGHYANVACAQLGFPSYVSSDNLRVSSLEGQFREEFVSIDHLLPDDKVTALHHSVYVREGCASGHVVTLQCTACGHRRGYSSRIVGGNMSLLSQWPWQASLQFQGYHLCGGSVITPLWIITAAHCVYDLYLPKSWTIQVGLVSLLDNPAPSHLVEKIVYHSKYKPKRLGNDIALMKLAGPLTFNEMIQPVCLPNSEENFPDGKVCWTSGWGATEDGAGDASPVLNHAAVPLISNKICNHRDVYGGIISPSMLCAGYLTGGVDSCQGDSGGPLVCQERRLWKLVGATSFGIGCAEVNKPGVYTRVTSFLDWIHEQMERDLKT

SEQ ID NO: 3127 - protein, 551 aa, Homo sapiens
IQSPVSCSCWGWGLSFNKDTPRGRVQGLQRPGARTRTRTPTARLPASPVLRRERSEGLRRPDGLQSAAIMSEIRKDTLKAILLELECHFTWNLLKEDIDLFEVEDTIGQQLEFLTTKSRLALYNLLAYVKHLKGQNKDALECLEQAEEIIQQEHSDKEEVRSLVTWGNYAWVYYHMDQLEEAQKYTGKIGNVCKKLSSPSNYKLECPETDCEKGWALLKFGGKYYQKAKAAFEKALEVEPDNPEFNIGYAITVYRLDDSDREGSVKSFSLGPLRKAVTLNPDNSYIKVFLALKLQDVHAEAEGEKYIEEILDQISSQPYVLRYAAKFYRRKNSWNKALELLKKALEVTPTSSFLHHQMGLCYRAQMIQIKKATHNRPKGKDKLKVDELISSAIFHFKAAMERDSMFAFAYTDLANMYAEGGQYSNAEDIFRKALRLENITDDHKHQIHYHYGRFQEFHRKSENTAIHHYLEALKVKDRSPLRTKLTSALKKLSTKRLCHNALDVQSLSALGFVYKLEGEKRQAAEYYEKAQKIDPENAEFLTALCELRLSI

SEQ ID NO: 3128 - protein, 276 aa, Homo sapiens
PRIVSRIFQCCAWNGGVFWFSLLLFYRVFIPVLQSVTARIIGDPSLHGDVWSWLEFFLTSIFSALWVLPLFVLSKVVNAIWFQDIADLAFEVSGRKPHPFPSVSKIIADMLFNLLLQALFLIQGMFVSLFPIHLVGQLVSLLHMSLLYSLYCFEYRWFNKGIEMHQRLSNIERNWPYYFGFGLPLAFLTAMQSSYIISGCLFSILFPLFIISANEAKTPGKAYLFQLRLFSLVVFLSNRLFHKTVYLQSALSSSTSAEKFPSPHPSPAKLKATAGH

SEQ ID NO: 3129 - protein, 325 aa, Homo sapiens
  MISC_FEATURE (310): Xaa equals any of the twenty naturally occurring L-amino acids
VGVPSPAPPCSWEVGPGGGWTPGILKEGQGGRRTPLLLLATRTRGLLSLFPPAAMHPAAFPLPVVVAAVLWGAAPTRGLIRATSDHNASMDFADLPALFGATLSQEGLQGFLVEAHPDNACSPIAPPPPAPVNGSVFIALLRRFDCNFDLKVLNAQKAGYGAAVVHNVNSNELLNMVWNSEEIQQQIWIPSVFIGERSSEYLRALFVYEKGARVLLVPDNTFPLGYYLIPFTGIVGLLVLAMGAVMIARCIQHRKRLQRNRLTKEQLKQIPTHDYQKGDQYDVCAICLDEYEDGDKLRVLPCAHAYHSRXVDPWLTQTGRLPICK

SEQ ID NO: 3130 - protein, 253 aa, Homo sapiens
CGASPTRASGRCPTSTPTSQQGELLVQGHLHLHEGRLPQHVWEGGPQAVRGRRVELFRAVPGLKLKIAGKSLPTEKFAIRKSRRYFSSNPISLPVPALEMMYIWNGYAVIGKQPKLTDGILEIITKAEEMLEKGPENEYSVDDECLVKLLKGLCLKYLGRVQEAEENFRSISANEKKIKYDHYLIPNALLELALLLMEQDRNEEAIKLLESAKQNYKNYSMESRTHFRIQAATLQAKSSLENSSRSMVSSVSL

SEQ ID NO: 3131 - protein, 54 aa, Homo sapiens
RRKGPSHSPAKPYLSYQVPHLNQNAWNNLEKYSRSLTRSYQNVYVCTGPLFLPR

SEQ ID NO: 3132 - protein, 282 aa, Homo sapiens
  MISC_FEATURE (198): Xaa equals any of the twenty naturally occurring L-amino acids
  MISC_FEATURE (210): Xaa equals any of the twenty naturally occurring L-amino acids
RHGAWWENGVGCHVIGFLSIFASESSVFLLTLAALERGFSVKYSAKFETKAPFSSLKVIILLCALLALTMAAVPLLGGSKYGASPLCLPLPFGEPSTMGYMVALILLNSLCFLMMTIAYTKLYCNLDKGDLENIWDCSMVKHIALLLFTNCILNCPVAFLSFSSLINLTFISPEVIKFILLVVVPLPACLNPLLYILXNPHFKEDLVSLXKQTYVWTRSKHPSLMSINSDDVEKQSCDSTQALVTFTSSSITYDLPPSSVPSPAYPVTESCHLSSVAFVPCL

SEQ ID NO: 3133 - protein, 285 aa, Homo sapiens
YRARFAANKEADVTARLQPPAATARQKPEWTCLLKLLLFHFSGVTESSAPRLNSVPFGRMEADASVDMFSKVLEHQLLQTTKLVEEHLDSEIQKLDQMDEDELERLKEKRLQALRKAQQQKQEWLSKGHGEYREIPSERDFFQEVKESENVVCHFYRDSTFRCKILDRHLAILSKKHLETKFLKLNVEKAPFLCERLHIKVIPTLALLKDGKTQDYVVGFTDLGNTDDFTTETLEWRLGSSDILNYSGNLMEPPFQNQKKFGTNFTKLEKKTIRGKKYDSDSDDD

SEQ ID NO: 3134 - protein, 712 aa, Homo sapiens
PGSTAALTPPRSPPPPPLRPPPMKRLPLLVVFSTLLNCSYTQNCTKTPCLPNAKCEIRNGIEACYCNMGFSGNGVTICEDDNECGNLTQSCGENANCTNTEGSYYCMCVPGFRSSSNQDRFITNDGTVCIENVNANCHLDNVCIAANINKTLTKIRSIKEPVALLQEVYRNSVTDLSPTDIITYIEILAESSSLLGYKNNTISAKDTLSNSTLTEFVKTVNNFVQRDTFVVWDKLSVNHRRTHLTKLMHTVEQATLRISQSFQKTTEFDTNSTDIALKVFFFDSYNMKHIHPHMNMDGDYINIFPKRKAAYDSNGNVAVAFLYYKSIGPLLSSSDNFLLKPQNYDNSEEEERVISSVISVSMSSNPPTLYELEKITFTLSHRKVTDRYRSLCAFWNYSPDTMNGSWSSEGCELTYSNETHTSCRCNHLTHFAILMSSGPSIGIKDYNILTRITQLGIIISLICLAICIFTFWFFSEIQSTRTTIHKNLCCSLFLAELVFLVGINTNTNKLFCSIIAGLLHYFFLAAFAWMCIEGIHLYLIVVGVIYNKGFLHKNFYIFGYLSPAVVVGFSAALGYRYYGTTKVCWLSTENNFIWSFIGPACLIILVNLLAFGVIIYKVFRHTAGLKPEVSCFENIRSCARGALALLFLLGTTWIFGVLHVVHASVVTAYLFTVSNAFQGMFIFLFLCVLSRKIQEEYYRLFKNVPCCFGCLR

SEQ ID NO: 3135 - protein, 193 aa, Homo sapiens
GSPESHAPDFCFRVGAMAVANSSPVNPVVFFDVSIGGQEVGRMKIELFADVVPKTAENFRQFCTGEFRKDGVPIGYKGSTFHRVIKDFMIQGGDFVNGDGTGVASIYRGPFADENFKLRHSAPGLLSMANSGPSTNGCQFFITCSKCDWLDGKHVVFGKIIDGLLVMRKIENVPTGPNNKPKLPVVISQCGEM

SEQ ID NO: 3136 - protein, 554 aa, Homo sapiens
  MISC_FEATURE (389): Xaa equals any of the twenty naturally occurring L-amino acids
  MISC_FEATURE (443): Xaa equals any of the twenty naturally occurring L-amino acids
  MISC_FEATURE (461): Xaa equals any of the twenty naturally occurring L-amino acids
  MISC_FEATURE (516): Xaa equals any of the twenty naturally occurring L-amino acids
ARVLYEVQIPEDSPVGSQVAIVSARDLDIGTNGEISYAFSQASEDIRKTFRLSAKSGELLLRQKLDFESIQTYTVNIQATDGGGLSGTCVVFVQVMDLNDNPPELTMSTLINQIPENLQDTLIAVFSVSDPDSGDNGRMVCSIQDDLPFFLKPSVENFYTLVISTALDRETRSEYNITITVTDFGTPRLKTEHNITVLVSDVNDNAPAFTQTSYTLFVRENNSPALHIGSVSATDRDSGTNAQVTYSLLPPQDPHLPLASLVSINADNGHLFALRSLDYEALQAFEFRVGATDRGSPALSSEALVRVLVLDANDNSPFVLYPLQNGSAPCTELVPRAAEPGYLVTKVVAVDGDSGQNAWLSYQLLKATEPGLFGVWAHNGEVRTARLLXERDAAKQRLVVLVKDNGEPPRSATATLHVLLVDGFSQPYLLLPEAAPAQAQADXLTVYLVVALASVSSLFLXSVLLFVAVRLCRRSRAASVGRCSVPEGPFPGQMVDVSGTGTLSQSYQYEVCLTGXSGTNEFKFLKPIIPNFVAQGAERVSEANPSFRKSFEFT

SEQ ID NO: 3137 - protein, 74 aa, Homo sapiens
  MISC_FEATURE (1): Xaa equals any of the twenty naturally occurring L-amino acids
XPPSSFFFFFFTVNVKFTPRSFWGSRPKHTGGRSEMRAHVPQAPWARQAPPVLPLWTVVNDHPHEKPVSRPQNT

SEQ ID NO: 3138 - protein, 807 aa, Homo sapiens
  MISC_FEATURE (114): Xaa equals any of the twenty naturally occurring L-amino acids
KKLISMDSWFILVLLGSGLICVSANNATTVAPSVGITRLINSSTAEPVKEEAKTSNPTSSLTSLSVAPTFSPNITLGPTYLTTVNSSDSDNGTTRTASTNSIGITISPNGTWLXDNQFTDARTEPWEGNSSTAATTPETFPPSGNSDSKDRRDETPIIAVMVALSSLLVIVFIIIVLYMLRFKKYKQAGSHSNSFRLSNGRTEDVEPQSVPLLARSPSTNRKYPPLPVDKLEEEINRRMADDNKLFREEFNALPACPIQATCEAASKEENKEKNRYVNILPYDHSRVHLTPVEGVPDSDYINASFINGYQEKNKFIAAQGPKEETVNDFWRMIWEQNTATIVMVTNLKERKECKCAQYWPDQGCWTYGNIRVSVEDVTVLVDYTVRKFCIQQVGDMTNRKPQRLITQFHFTSWPDFGVPFTPIGMLKFLKKVKACNPQYAGAIVVHCSAGVGRTGTFVVIDAMLDMMHTERKVDVYGFVSRIRAQRCQMVQTDMQYVFIYQALLEHYLYGDTELEVTSLETHLQKIYNKIPGTSNNGLEEEFKKLTSIKIQNDKMRTGNLPANMKKNRVLQIIPYEFNRVIIPVKRGEENTDYVNASFIDGYRQKDSYIASQGPLLHTIEDFWRMIWEWKSCSIVMLTELEERGQEKCAQYWPSDGLVSYGDITVELKKEEECESYTVRDLLVTNTRENKSRQIRQFHFHGWPEVGIPSDGKGMISIIAAVQKQQQQSGNHPITVHCSAGAGRTGTFCALSTVLERVKAEGILDVFQTVKSLRLQRPHMVQTLEQYEFCYKVVQEYIDAFSDYANFK

SEQ ID NO: 3139 - protein, 412 aa, Homo sapiens
  MISC_FEATURE (36): Xaa equals any of the twenty naturally occurring L-amino acids
GLGQRCRIQQCPGTETAEYQSLCPHRPVPHRRTRHXRCTPAAVCGSSSRCCNSMSSPGPCSHTRHSCTPGLGRADIRPRLSGGSGLHWAPGSPGREGSRCVNTVGSYHCTCEPPLVLDGSQRRCVSNESQSLDDNLGVCWQEVGADLVCSHPRLDRQATYTECCCLYGEAWGMDCALCPAQDSDDFEALCNVLRPPAYSPPRPGGFGLPYEYGPDLGPPYQGLPYGPELYPPPALPYDPYPPPPGPFARREAPYGAPRFDMPDFEDDGGPYGESEAPAPPGPGTRWPYRSRDTRRSFPEPEEPPEGGSYAGSLAEPYEELEAEECGILDGCTNGRCVRVPEGFTCRCFDGYRLDMTRMACVDINECDEAEAASPLCVNARCLNTDGSFRCICRPGFAPTHQPHHCAPARPRA

SEQ ID NO: 3140 - protein, 108 aa, Homo sapiens
QSGTSKDENSIIFAAKSAEEKNNWMAALISLHYRSTLDRMLDSVLLKEENEQPLRLPSPEVYRFVVKDSEENIVFEDNLQSRSGIPIIKGGTVVKLIERLTYHMYAGM

SEQ ID NO: 3141 - protein, 464 aa, Homo sapiens
  MISC_FEATURE (101): Xaa equals any of the twenty naturally occurring L-amino acids
  MISC_FEATURE (242): Xaa equals any of the twenty naturally occurring L-amino acids
  MISC_FEATURE (417): Xaa equals any of the twenty naturally occurring L-amino acids
ARRCDSNPCFRGVQCTDSRDGFQCGPCPEGYTGNGITCIDVDECKYHPCYPGVHCINLSPGFRCDACPVGFTGPMVQGVGISFAKSNKQVCTDIDECRNGXCVPNSICVNTLGSYRCGPCKPGYTGDQIRGCKAERNCRNPELNPCSVNAQCIEERQGDVTCVCGVGWAGDGYICGKDVDIDSYPDEELPCSARNCKKDNCKYVPNSGQEDADRDGIGDACDEDADGDGILNEQDNCVLIHXVDQRNSDKDIFGDACDNCLSVLNNDQKDTDGDGRGDACDDDMDGDGIKNILDNCPKFPNRDQRDKDGDGVGDACDSCPDVSNPNQSDVDNDLVGDSCDTNQDSDGDGHQDSTDNCPTVINSAQLDTDKDGIGDECDDDDDNDGIPDLVPPGPDNCRLVPNPAQEDSNSDGVGDIXESDFDQDQVIDRIDVCPRERRGSPWTDFQGLYQTFGPWILERGNAQI

SEQ ID NO: 3142 - protein, 180 aa, Homo sapiens
  MISC_FEATURE (63): Xaa equals any of the twenty naturally occurring L-amino acids
  MISC_FEATURE (135): Xaa equals any of the twenty naturally occurring L-amino acids
  MISC_FEATURE (158): Xaa equals any of the twenty naturally occurring L-amino acids
  MISC_FEATURE (165): Xaa equals any of the twenty naturally occurring L-amino acids
  MISC_FEATURE (172): Xaa equals any of the twenty naturally occurring L-amino acids
KPYKCKECGKAFHRYSILSTHKKIHTGEKPHKCGECGKAFNWSSTLITHKIIHSGEKPYKYEXCGKAFNQSSHLMRHKKIHSKRNLTNVNSVARSLRSPQLLLHIRSFILERNLTNVRNVAKVLANSQTLLNTRXFILERNPTNVKNVAYLLTSSHNXLYHKMDXHFEMEPXPNGEPMVG

SEQ ID NO: 3143 - protein, 355 aa, Homo sapiens
QRKKLSFFARNWMASTGSQASDIDEIFGFFNDGEPPTKKPRKLLPSLKTKKPRELVLVIGTGISAAVAPQVPALKSWKGLIQALLDAAIDFDLLEDEESKKFQKCLHEDKNLVHVAHDLIQKLSPRTSNVRSTFFKDCLYEVFDDLESKMEDSGKQLLQSVLHLMENGALVLTTNFDNLLELYAADQGKQLESLDLTDEKKVLEWAQEKRKLSVLHIHGVYTNPSGIVLHPAGYQNVLRNTEVMREIQKLYENKSFLFLGCGWTVDDTTFQALFLEAVKHKSDLEHFMLVRRGDVDEFKKLRENMLDKGIKVISYGDDYADLPEYFKRLTCEISTRGTSADGERRSAKWLICSTQ

SEQ ID NO: 3144 - protein, 244 aa, Homo sapiens
TSSRRSPVREASPLGPAALRDSEEKLAPGGRGSVNMGKGDPNKPRGKMSSYAFFVQTCREEHKKKHPDSSVNFAEFSKKCSERWKTMSAKEKSKFEDMAKSDKARYDREMKNYVPPKGDKKGKKKDPNAPKRPPSAFFLFCSEHRPKIKSEHPGLSIGDTAKKLGEMWSEQSAKDKQPYEQKAAKLKEKYEKDIAAYRAKGKSEAGKKGPGRPTGSKKKNEPEDEEEEEEEEDEDEEEEDEDEE

SEQ ID NO: 3145 - protein, 52 aa, Homo sapiens
RKPSYDTETDPSEGLMNVLKKIYEDGDDDMKRTINKAWVESREKQAKGDTEF

SEQ ID NO: 3146 - protein, 206 aa, Homo sapiens
LPVHLIFSPKVDSRAESIDKKISRLDAELVKYKDQIKKMREGPAKNMVKQKALRVLKQKRMYEQQRDNLAQQSFNMEQANYTIQSLKDTKTTVDAMKLGVKEMKKAYKQVKIDQIEDLQDQLEDMMEDANEIQEALSRSYGTPELDEDDLEAELDALGDELLADEDSSYLDEAASAPAIPEGVPTDTKNKDGVLVDEFGLPQIPAS

SEQ ID NO: 3147 - protein, 118 aa, Homo sapiens
  MISC_FEATURE (76): Xaa equals any of the twenty naturally occurring L-amino acids
  MISC_FEATURE (88): Xaa equals any of the twenty naturally occurring L-amino acids
  MISC_FEATURE (108): Xaa equals any of the twenty naturally occurring L-amino acids
  MISC_FEATURE (113): Xaa equals any of the twenty naturally occurring L-amino acids
  MISC_FEATURE (117): Xaa equals any of the twenty naturally occurring L-amino acids
IALKSEKFQFQSCSECQDSLTNWYYEKDGKLYCPKDYWGKFGEFCHGCSLLMTGPFMVAGEFKYHPECFACMSCKXIIEDGDAYALVXHATLYCGKCHNEVVLAPMFXETLHXFVYXA

SEQ ID NO: 3148 - protein, 636 aa, Homo sapiens
  MISC_FEATURE (2): Xaa equals any of the twenty naturally occurring L-amino acids
TXSSKLTLTKGNKSWSSTAVAAALELVDPPGCRNSAREAPAMRAARAAPLLQLLLLLGPWLEAAGVAESPLPAVVLAILARNAEHSLPHYLGALERLDYPRARMALWCATDHNVDNTTEMLQEWLAAVGDDYAAVVWRPEGEPRFYPDEEGPKHWTKERHQFLMELKQEALTFARNWGADYILFADTDNILTNNQTLRLLMGQGLPVVAPMLDSQTYYSNFWCGITPQGYYRRTAEYFPTKNRQRRGCFRVPMVHSTFLASLRAEGADQLAFYPPHPNYTWPFDDIIVFAYACQAAGVSVHVCNEHRYGYMNVPVKSHQGLEDERVNFIHLILEALVDGPRMQASAHVTRPSKRPSKIGFDEVFVISLARRPDRRERMLASLWEMEISGRVVDAVDGWMLNSSAIRNLGVDLLPGYQDPYSGRTLTKGEVGCFLSHYSIWEEVVARGLARVLVFEDDVRFESNFRGRLERLMEDVEAEKLSWDLIYLGRKQVNPEKETAVEGLPGLVVAGYSYWTLAYALRLAGARKLLASQPLRRMLPVDEFLPIMFDQHPNEQYKAHFWPRDLVAFSAQPLLAAPTHYAGDAEWLSDTETSSPWDDDSGRLISWSGSQKTLRSPRLDLTGSSGHSLQPQPRDEL

SEQ ID NO: 3149 - protein, 340 aa, Homo sapiens
AAAAGAAETRGRAVSKMEEKPSGPIPDMLATAEPSSSETDKEVLSPAVPAAAPSSSMSEEPGPEQAATPPVWERGGAGGMQQGSSPAPDSCQPGPGPSPGLTSIVSGTSEDLRPPRRRPPPGKQIPCSSPGCCLSFPSVRDLAQHLRTHCPPTQSLEGKLFRCSALSCTETFPSMQELVAHSKLHYKPNRYFKCENCLLRFRTHRSLFKHLHVCAEHAQSPAPPPPPALDREPPAPERPPEVDPASAPGLPFPLLEPFTTPAPAPTGPFLPYLNPAPFGLSPPRLRPFLAAAPGPPASSAAVWKKSQGAGSSPRRPQGGSDAPSGHAAPSRIVWEHTRGR

SEQ ID NO: 3150 - protein, 236 aa, Homo sapiens
  MISC_FEATURE (231): Xaa equals any of the twenty naturally occurring L-amino acids
KLYKCEECGKAFNQSSNLTTHKIIHTKEKPSKSEECDKAFIWSSTLTEHKRIHTREKTYKCEECGKAFSQPSHLTTHKRMHTGEKPYKCEECGKAFSQSSTLTTHKIIHTGEKPYKCEECGKAFRKSSTLTEHKIIHTGEKPYKCEECGKAFSQSSTLTRHTRMHTGEKPYKCEECGKAFNRSSKLTTHKIIHTGEKPYKCEECGKAFISSSTLNGHKRIHTREKPYKCEXCGQSI

SEQ ID NO: 3151 - protein, 71 aa, Homo sapiens
  MISC_FEATURE (68): Xaa equals any of the twenty naturally occurring L-amino acids
  MISC_FEATURE (69): Xaa equals any of the twenty naturally occurring L-amino acids
  MISC_FEATURE (70): Xaa equals any of the twenty naturally occurring L-amino acids
NFGSLLGACLILQITTGLFLAMHYSPDASTAFSSIAHITRGGARYPIRPIVSRITIHWPSFYNVVTGXXXK

SEQ ID NO: 3152 - protein, 63 aa, Homo sapiens
  MISC_FEATURE (12): Xaa equals any of the twenty naturally occurring L-amino acids
  MISC_FEATURE (16): Xaa equals any of the twenty naturally occurring L-amino acids
  MISC_FEATURE (21): Xaa equals any of the twenty naturally occurring L-amino acids
  MISC_FEATURE (30): Xaa equals any of the twenty naturally occurring L-amino acids
  MISC_FEATURE (36): Xaa equals any of the twenty naturally occurring L-amino acids
  MISC_FEATURE (45): Xaa equals any of the twenty naturally occurring L-amino acids
RNNFDTEEYCMXVCGXAMSQXLLKTTQEPXARDPDXLPTTAASTXDAGDKHLETPGDENEHAH

SEQ ID NO: 3153 - protein, 41 aa, Homo sapiens
IIIINTLTTTIFLGTTYDALSPELYTTYFVTKTLLLTSLFL

SEQ ID NO: 3154 - protein, 27 aa, Homo sapiens
  MISC_FEATURE (2): Xaa equals any of the twenty naturally occurring L-amino acids
  MISC_FEATURE (6): Xaa equals any of the twenty naturally occurring L-amino acids
  MISC_FEATURE (18): Xaa equals any of the twenty naturally occurring L-amino acids
FXLGVXKATCSSKEPNNXFKVKHVITI

SEQ ID NO: 3155 - protein, 97 aa, Homo sapiens
  MISC_FEATURE (10): Xaa equals any of the twenty naturally occurring L-amino acids
  MISC_FEATURE (12): Xaa equals any of the twenty naturally occurring L-amino acids
  MISC_FEATURE (19): Xaa equals any of the twenty naturally occurring L-amino acids
  MISC_FEATURE (24): Xaa equals any of the twenty naturally occurring L-amino acids
  MISC_FEATURE (26): Xaa equals any of the twenty naturally occurring L-amino acids
  MISC_FEATURE (33): Xaa equals any of the twenty naturally occurring L-amino acids
  MISC_FEATURE (34): Xaa equals any of the twenty naturally occurring L-amino acids
  MISC_FEATURE (38): Xaa equals any of the twenty naturally occurring L-amino acids
  MISC_FEATURE (47): Xaa equals any of the twenty naturally occurring L-amino acids
  MISC_FEATURE (49): Xaa equals any of the twenty naturally occurring L-amino acids
  MISC_FEATURE (51): Xaa equals any of the twenty naturally occurring L-amino acids
  MISC_FEATURE (52): Xaa equals any of the twenty naturally occurring L-amino acids
  MISC_FEATURE (65): Xaa equals any of the twenty naturally occurring L-amino acids
  MISC_FEATURE (66): Xaa equals any of the twenty naturally occurring L-amino acids
  MISC_FEATURE (79): Xaa equals any of the twenty naturally occurring L-amino acids
  MISC_FEATURE (82): Xaa equals any of the twenty naturally occurring L-amino acids
  MISC_FEATURE (90): Xaa equals any of the twenty naturally occurring L-amino acids
  MISC_FEATURE (92): Xaa equals any of the twenty naturally occurring L-amino acids
YHMLERCYAXTXVETKDTXLATVXSXLLLTTCXXPKGXTLVNLLQSXSXDXXVLHYIGQLAICRXXDLHFHTWLEHSTXNAXIAFGCKRXPXWDIPR

SEQ ID NO: 3156 - protein, 66 aa, Homo sapiens
  MISC_FEATURE (3): Xaa equals any of the twenty naturally occurring L-amino acids
  MISC_FEATURE (5): Xaa equals any of the twenty naturally occurring L-amino acids
  MISC_FEATURE (39): Xaa equals any of the twenty naturally occurring L-amino acids
LSXLXLRDFLLAPRRRDSLTLTHMATLAQKPCGIEKQIXFYVLFSLSIFQHRLNSLKPRHLLRPDP

SEQ ID NO: 3157 - protein, 159 aa, Homo sapiens
  MISC_FEATURE (4): Xaa equals any of the twenty naturally occurring L-amino acids
  MISC_FEATURE (10): Xaa equals any of the twenty naturally occurring L-amino acids
  MISC_FEATURE (81): Xaa equals any of the twenty naturally occurring L-amino acids
  MISC_FEATURE (118): Xaa equals any of the twenty naturally occurring L-amino acids
LPVXLFKVRXQVPVRNSRVDFDSDKASSAARAAWGNSSYKIILKQSAKEFAKYNQLYPDQFLPLQRDMIGKFGAAKDQWFXSFLLQVENHSSWHRLFVDPLSRAMYSSDGPDFEFVQXKRKEGLSIHEAVWQLAWKKSGPEMASLEAWLEEHEKYRSVA

SEQ ID NO: 3158 - protein, 28 aa, Homo sapiens
FGKIKVVIWLIFGQVSLNLGINLLFLFF

SEQ ID NO: 3159 - protein, 77 aa, Homo sapiens
  MISC_FEATURE (67): Xaa equals any of the twenty naturally occurring L-amino acids
LHSFIDIPCQRRFSIKLYSFLFYNLCHLLDSVCVICKKQAETMDMISEEHISTDFHKANVQYLFIEXFLVQSAPVFL

SEQ ID NO: 3160 - protein, 38 aa, Homo sapiens
WKETVFTKSPYQEFTDHLVKTHTRVSVQRTQAPAVATT

SEQ ID NO: 3161 - protein, 139 aa, Homo sapiens
EPLLWPPRGREAEMADEIAKAQVARPGGDTIFGKIIRKEIPAKIIFEDDRCLAFHDISPQAPTHFLVIPKKHISQISVAEDDDESLLGHLMIVGKKCAADLGLNKGYRMVVNEGSDGGQSVYHVHLHVLGGRQMHWPPG

SEQ ID NO: 3162 - protein, 81 aa, Homo sapiens
ESGMQNMSIHTKTTSGYAGGLSSAYGGLTSPGLSYSLGSSFGSGAGSSSFSRTSSSRAVVVKKIETRDGKLVSESSDVLPK

SEQ ID NO: 3163 - protein, 91 aa, Homo sapiens
  MISC_FEATURE (90): Xaa equals any of the twenty naturally occurring L-amino acids
  MISC_FEATURE (91): Xaa equals any of the twenty naturally occurring L-amino acids
QTFREKAAMPVAQHLNPVQVLQLVEETLPDNSILVVDGGDFVGTAAHLVQPRGPLRWLDPGAFGTLGVGAGFALGAKLCRPDAEVWCLVXX

SEQ ID NO: 3164 - protein, 51 aa, Homo sapiens
  MISC_FEATURE (22): Xaa equals any of the twenty naturally occurring L-amino acids
  MISC_FEATURE (37): Xaa equals any of the twenty naturally occurring L-amino acids
  MISC_FEATURE (42): Xaa equals any of the twenty naturally occurring L-amino acids
RKASVVVWRKVHIFLMVLSDMXLLLESQISSTDLILXYSLQXSKDRDYFHV

SEQ ID NO: 3165 - protein, 66 aa, Homo sapiens
CLWPEHRGLLLALSWKRFAFTPVNVFILNLCKVFFVRNSRFFEEMTTNFGFLLLCENIRPQQHVIV

SEQ ID NO: 3166 - protein, 180 aa, Homo sapiens
  MISC_FEATURE (100): Xaa equals any of the twenty naturally occurring L-amino acids
  MISC_FEATURE (101): Xaa equals any of the twenty naturally occurring L-amino acids
  MISC_FEATURE (107): Xaa equals any of the twenty naturally occurring L-amino acids
  MISC_FEATURE (156): Xaa equals any of the twenty naturally occurring L-amino acids
  MISC_FEATURE (167): Xaa equals any of the twenty naturally occurring L-amino acids
  MISC_FEATURE (178): Xaa equals any of the twenty naturally occurring L-amino acids
QDLRDKILGATIENSRIVLQIDNARLAADDFRTKFETEQALRMSVEADINGLRRVLDELTLARTDLEMQIEGLKEELAYLKKNHEEEISTLRGQVGGQVXXEVDSAXGTDLAKILSDMRSQYEVMAEQNRKDAEAWFTSRTEELNREVRWPHGAAXDEQVEVTDLRXTLQGLENELAXTA

SEQ ID NO: 3167 - protein, 30 aa, Homo sapiens
RTSSSRAVVVKKIETRDGKLVSESSDVLPK

SEQ ID NO: 3168 - protein, 154 aa, Homo sapiens
  MISC_FEATURE (109): Xaa equals any of the twenty naturally occurring L-amino acids
  MISC_FEATURE (130): Xaa equals any of the twenty naturally occurring L-amino acids
  MISC_FEATURE (132): Xaa equals any of the twenty naturally occurring L-amino acids
  MISC_FEATURE (141): Xaa equals any of the twenty naturally occurring L-amino acids
  MISC_FEATURE (147): Xaa equals any of the twenty naturally occurring L-amino acids
ALTGFACASCFLFYQGPANMGRVRTKTVKKAARVIIEKYYTRLGNDFHTNKRVCEEIAIIPSKKLRNKIAGYVTHLMKRIQRGPVRGISIKLQEEERERRDNYVPEVSXLDQEIIEVDPDTKEMLKLLDXGXLSNLQVTHXTVGMNXKTPRGPV

SEQ ID NO: 3169 - protein, 44 aa, Homo sapiens
  MISC_FEATURE (15): Xaa equals any of the twenty naturally occurring L-amino acids
  MISC_FEATURE (18): Xaa equals any of the twenty naturally occurring L-amino acids
  MISC_FEATURE (22): Xaa equals any of the twenty naturally occurring L-amino acids
  MISC_FEATURE (24): Xaa equals any of the twenty naturally occurring L-amino acids
  MISC_FEATURE (31): Xaa equals any of the twenty naturally occurring L-amino acids
  MISC_FEATURE (36): Xaa equals any of the twenty naturally occurring L-amino acids
  MISC_FEATURE (37): Xaa equals any of the twenty naturally occurring L-amino acids
CALGCPIVYINEADXIFXFLRXLXFCRLGVXLKKIXXFHIFKNV

SEQ ID NO: 3170 - protein, 54 aa, Homo sapiens
  MISC_FEATURE (27): Xaa equals any of the twenty naturally occurring L-amino acids
VCSPVILNVGAINNRMRQESKTDTATXGAPAPASRNAIACIPPRRKYQMHGELP

SEQ ID NO: 3171 - protein, 101 aa, Homo sapiens
  MISC_FEATURE (1): Xaa equals any of the twenty naturally occurring L-amino acids
  MISC_FEATURE (3): Xaa equals any of the twenty naturally occurring L-amino acids
  MISC_FEATURE (4): Xaa equals any of the twenty naturally occurring L-amino acids
  MISC_FEATURE (5): Xaa equals any of the twenty naturally occurring L-amino acids
  MISC_FEATURE (7): Xaa equals any of the twenty naturally occurring L-amino acids
XIXXXVXAVRSDSRVDPRVRNLLLLIVPILIAMAFLMLTERKILGYIQLRKGPNVVGPYGLLQPFADAIKLFTKEPLKPATSTITLYITAPTLALTIALLL

SEQ ID NO: 3172 - protein, 167 aa, Homo sapiens
  MISC_FEATURE (5): Xaa equals any of the twenty naturally occurring L-amino acids
  MISC_FEATURE (14): Xaa equals any of the twenty naturally occurring L-amino acids
  MISC_FEATURE (17): Xaa equals any of the twenty naturally occurring L-amino acids
  MISC_FEATURE (25): Xaa equals any of the twenty naturally occurring L-amino acids
  MISC_FEATURE (50): Xaa equals any of the twenty naturally occurring L-amino acids
  MISC_FEATURE (52): Xaa equals any of the twenty naturally occurring L-amino acids
  MISC_FEATURE (54): Xaa equals any of the twenty naturally occurring L-amino acids
  MISC_FEATURE (58): Xaa equals any of the twenty naturally occurring L-amino acids
  MISC_FEATURE (59): Xaa equals any of the twenty naturally occurring L-amino acids
  MISC_FEATURE (89): Xaa equals any of the twenty naturally occurring L-amino acids
  MISC_FEATURE (100): Xaa equals any of the twenty naturally occurring L-amino acids
  MISC_FEATURE (102): Xaa equals any of the twenty naturally occurring L-amino acids
  MISC_FEATURE (111): Xaa equals any of the twenty naturally occurring L-amino acids
  MISC_FEATURE (121): Xaa equals any of the twenty naturally occurring L-amino acids
  MISC_FEATURE (131): Xaa equals any of the twenty naturally occurring L-amino acids
  MISC_FEATURE (137): Xaa equals any of the twenty naturally occurring L-amino acids
  MISC_FEATURE (150): Xaa equals any of the twenty naturally occurring L-amino acids
  MISC_FEATURE (151): Xaa equals any of the twenty naturally occurring L-amino acids
  MISC_FEATURE (161): Xaa equals any of the twenty naturally occurring L-amino acids
  MISC_FEATURE (165): Xaa equals any of the twenty naturally occurring L-amino acids
LRENXKWLVKASPXAGXGGAPASLXNLRWGIPPRGPLAKGKFPGNRRSPXPXKXSAGXXLSFWFFRTAPGTRRLKGKNRMEWFWGPTGXRVGKKGEFRGXEXGPGGFGPGXLASGPNEKCXKGFFSGLAKXSKMGGXKGNSVQSNPRRKXXPKLAKAFWLXFGFXKE

SEQ ID NO: 3173 - protein, 32 aa, Homo sapiens
AELARKEEMDKLLDKISELEGNLQTLRNSNST

SEQ ID NO: 3174 - protein, 121 aa, Homo sapiens
  MISC_FEATURE (91): Xaa equals any of the twenty naturally occurring L-amino acids
  MISC_FEATURE (99): Xaa equals any of the twenty naturally occurring L-amino acids
  MISC_FEATURE (106): Xaa equals any of the twenty naturally occurring L-amino acids
  MISC_FEATURE (109): Xaa equals any of the twenty naturally occurring L-amino acids
  MISC_FEATURE (112): Xaa equals any of the twenty naturally occurring L-amino acids
  MISC_FEATURE (115): Xaa equals any of the twenty naturally occurring L-amino acids
IRHEGVQLWRLLVSNSQDAAESAGSSSDWAEDDKHCFPQHFKNKVPEKQKLFQEDDEIPLYLKGGVADALLYRATMILTVGGTAYAIYELXVASFSQEXGVTSVIXAIXWVXFHXVLLWDQ

SEQ ID NO: 3175 - protein, 69 aa, Homo sapiens
NKISSPNTLTVLCLPECETFLLFSSINNLFASQRCMFWKKIACSLVVKNTESVDGVSCPPDQAATWYLF

SEQ ID NO: 3176 - protein, 54 aa, Homo sapiens
SKEAITCYVQYTLKRNLKQVIVMIKIMHRHGYLIFSNRKSHPYFLVLLHLILFG

SEQ ID NO: 3177 - protein, 116 aa, Homo sapiens
  MISC_FEATURE (114): Xaa equals any of the twenty naturally occurring L-amino acids
  MISC_FEATURE (115): Xaa equals any of the twenty naturally occurring L-amino acids
GGGIGDRDGVMPKMDIISGTLGKAFGCVGGYIASTSSLIDTVRSYAAGFIFTTSLPPMLLAGALESVRILKSAEGRVLRRQHQRNVKLMRQMLMDAGLPVVHCPSHIIPVRVAXXG

SEQ ID NO: 3178 - protein, 91 aa, Homo sapiens
  MISC_FEATURE (90): Xaa equals any of the twenty naturally occurring L-amino acids
CSHEVGLLQHPVVFKHSFSEIVIVLSVLMCASSFFILLFSWHQKVVAFSVLDCTKEAFGEEGRTLNSFPGNEKSPLSIQCCNFWISATLXF

SEQ ID NO: 3179 - protein, 63 aa, Homo sapiens
  MISC_FEATURE (2): Xaa equals any of the twenty naturally occurring L-amino acids
  MISC_FEATURE (15): Xaa equals any of the twenty naturally occurring L-amino acids
  MISC_FEATURE (29): Xaa equals any of the twenty naturally occurring L-amino acids
  MISC_FEATURE (33): Xaa equals any of the twenty naturally occurring L-amino acids
  MISC_FEATURE (40): Xaa equals any of the twenty naturally occurring L-amino acids
  MISC_FEATURE (44): Xaa equals any of the twenty naturally occurring L-amino acids
  MISC_FEATURE (62): Xaa equals any of the twenty naturally occurring L-amino acids
GXVGVRPSLHPATSXASGSASPTLARAMXSVSXLACIYSXLILXDDEVTVTEDKINALIKAXV

SEQ ID NO: 3180 - protein, 210 aa, Homo sapiens
  MISC_FEATURE (15): Xaa equals any of the twenty naturally occurring L-amino acids
  MISC_FEATURE (20): Xaa equals any of the twenty naturally occurring L-amino acids
  MISC_FEATURE (25): Xaa equals any of the twenty naturally occurring L-amino acids
  MISC_FEATURE (30): Xaa equals any of the twenty naturally occurring L-amino acids
  MISC_FEATURE (45): Xaa equals any of the twenty naturally occurring L-amino acids
  MISC_FEATURE (48): Xaa equals any of the twenty naturally occurring L-amino acids
  MISC_FEATURE (55): Xaa equals any of the twenty naturally occurring L-amino acids
  MISC_FEATURE (92): Xaa equals any of the twenty naturally occurring L-amino acids
  MISC_FEATURE (93): Xaa equals any of the twenty naturally occurring L-amino acids
  MISC_FEATURE (106): Xaa equals any of the twenty naturally occurring L-amino acids
  MISC_FEATURE (123): Xaa equals any of the twenty naturally occurring L-amino acids
  MISC_FEATURE (124): Xaa equals any of the twenty naturally occurring L-amino acids
  MISC_FEATURE (162): Xaa equals any of the twenty naturally occurring L-amino acids
  MISC_FEATURE (178): Xaa equals any of the twenty naturally occurring L-amino acids
  MISC_FEATURE (179): Xaa equals any of the twenty naturally occurring L-amino acids
  MISC_FEATURE (184): Xaa equals any of the twenty naturally occurring L-amino acids
  MISC_FEATURE (193): Xaa equals any of the twenty naturally occurring L-amino acids
  MISC_FEATURE (203): Xaa equals any of the twenty naturally occurring L-amino acids
  MISC_FEATURE (209): Xaa equals any of the twenty naturally occurring L-amino acids
  MISC_FEATURE (210): Xaa equals any of the twenty naturally occurring L-amino acids
LGLPALLKVRLQVPXRNSRXDPRVXIAGRXTPGTFTNQIQAAFRXPRXLVVTDPXADHQPLTEASYVNLPTIALCNTDSPLRYVDIAIPCNXXGAHSVGLMWWMLXREGLRMRGTISREHPWXXMPDLYFYRDPEEIEKEEQAAAEKAVTKEEFQGEWTAPXPEFTATQSEVADWSEXXQGPSXPIQQFPTEXLERLSLARKXGLATSXX

SEQ ID NO: 3181 - protein, 145 aa, Homo sapiens
  MISC_FEATURE (65): Xaa equals any of the twenty naturally occurring L-amino acids
  MISC_FEATURE (92): Xaa equals any of the twenty naturally occurring L-amino acids
  MISC_FEATURE (124): Xaa equals any of the twenty naturally occurring L-amino acids
LTAVRSRRGTSRSGSPRATAMAFKDTGKTPVEPEVAIHRIRITLTSRNVKSLEKVCADLIRGAKXKNLKVKGPVRMPTKTLRITTRKTSLGXKVLKLGNRFQMRIPSDSLTCTSPSEIGKQITXISIEPGVEVESHHCRCLSQLF

SEQ ID NO: 3182 - protein, 181 aa, Homo sapiens
  MISC_FEATURE (96): Xaa equals any of the twenty naturally occurring L-amino acids
  MISC_FEATURE (100): Xaa equals any of the twenty naturally occurring L-amino acids
  MISC_FEATURE (123): Xaa equals any of the twenty naturally occurring L-amino acids
  MISC_FEATURE (133): Xaa equals any of the twenty naturally occurring L-amino acids
  MISC_FEATURE (155): Xaa equals any of the twenty naturally occurring L-amino acids
  MISC_FEATURE (158): Xaa equals any of the twenty naturally occurring L-amino acids
  MISC_FEATURE (167): Xaa equals any of the twenty naturally occurring L-amino acids
  MISC_FEATURE (180): Xaa equals any of the twenty naturally occurring L-amino acids
AGTMEGVEEKKKEVPAVPETLKKKRRNFAELKIKRLRKKFAQKMLRKARRKLIYEKAKHYHKEYRQMYRTEIRMARMARKAGNFYVPAEPKLAFVXRIRXIMGVSPKGSKRCLQAFFAFGQNXSMGTLLVESXKQGLSELNHGLREFGKKPINIXNGXGNPPNSWKXQVKWKPKFLPKPXG

SEQ ID NO: 3183 - protein, 55 aa, Homo sapiens
IFVKTLTGKTITLEVEPSDTIENVKAKIQDKEGIPPDQQRLIFAGKQAGRWTHPG

SEQ ID NO: 3184 - protein, 117 aa, Homo sapiens
  MISC_FEATURE (116): Xaa equals any of the twenty naturally occurring L-amino acids
PDLGTDKDKEQWKEVHKQVVESAYEVIKLKGYTSWAIGLSVADLAESIMKNLRRVHPVSTMIKGLYGIKDDVFLSVPCILGQNGISDLVKVTLTSEEEARLKKSADTLWGIKRSCXF

SEQ ID NO: 3185 - protein, 38 aa, Homo sapiens
  MISC_FEATURE (2): Xaa equals any of the twenty naturally occurring L-amino acids
  MISC_FEATURE (3): Xaa equals any of the twenty naturally occurring L-amino acids
  MISC_FEATURE (32): Xaa equals any of the twenty naturally occurring L-amino acids
  MISC_FEATURE (33): Xaa equals any of the twenty naturally occurring L-amino acids
  MISC_FEATURE (34): Xaa equals any of the twenty naturally occurring L-amino acids
  MISC_FEATURE (37): Xaa equals any of the twenty naturally occurring L-amino acids
  MISC_FEATURE (38): Xaa equals any of the twenty naturally occurring L-amino acids
KXXVPPSRVPGPGIPGVRPTRPDQGYCRLSFXXXFFXX

SEQ ID NO: 3186 - protein, 101 aa, Homo sapiens
AKVEAMNKRLGSLVDEFKELVYPPDYNPEGKVTKRKHDNEGSGSKRPKVEYSEEELKTHISKGTLGKFTVPMLKEACRAYGLKSGLKKQELLEALTKHFQD

SEQ ID NO: 3187 - protein, 89 aa, Homo sapiens
  MISC_FEATURE (50): Xaa equals any of the twenty naturally occurring L-amino acids
  MISC_FEATURE (57): Xaa equals any of the twenty naturally occurring L-amino acids
  MISC_FEATURE (63): Xaa equals any of the twenty naturally occurring L-amino acids
  MISC_FEATURE (89): Xaa equals any of the twenty naturally occurring L-amino acids
GGQHLCHHPGCIDIILGRHFEQMKDDAIVCNIGHFDVEIDVKWLNENAVXKVNIKPXVDRYRXKNGPHHPAADGGWSTWVVPWATPASX

SEQ ID NO: 3188 - protein, 136 aa, Homo sapiens
EQLKGWLLLTRTVQKYTSYLLIFIVVVLGQLQDTDMTTQLISSNLELHSLSTGRLPRVVTANRMLKQMLFRYQGYIGAALVLGGVDVTGPHLYSIYPHGSTDKLPYVTMGSGSLQQWLYLKISLGQTWRRRKPRIW

SEQ ID NO: 3189 - protein, 66 aa, Homo sapiens
LCCPFHIKELLTTKAAPAFPICLSIWLAGKERTCMLVKEEVGWKKWGGTTVKSRVKPSWPKVSCRL

SEQ ID NO: 3190 - protein, 169 aa, Homo sapiens
  MISC_FEATURE (131): Xaa equals any of the twenty naturally occurring L-amino acids
  MISC_FEATURE (162): Xaa equals any of the twenty naturally occurring L-amino acids
TIEGTPAGTGPEFPDRPTRPHRLPAHPWAEGRERRGTRASETPTLRETGLVLGPRTQTQDRVDSACDGVAFLLPPSTSAFCREIFCVHRSHSESGTCPCADPDPSQQLSCRASSRPLSHPQRSHLKLEYPXVSSKRKKRRFSVCFSPQPCHRGESGFSLHPXSLLLTLG

SEQ ID NO: 3191 - protein, 169 aa, Homo sapiens
  MISC_FEATURE (53): Xaa equals any of the twenty naturally occurring L-amino acids
  MISC_FEATURE (81): Xaa equals any of the twenty naturally occurring L-amino acids
  MISC_FEATURE (136): Xaa equals any of the twenty naturally occurring L-amino acids
  MISC_FEATURE (139): Xaa equals any of the twenty naturally occurring L-amino acids
  MISC_FEATURE (144): Xaa equals any of the twenty naturally occurring L-amino acids
  MISC_FEATURE (149): Xaa equals any of the twenty naturally occurring L-amino acids
HRMKTPFSTELSLLQPDTPDCAGDSHTPLAFSFTEDLESSCLLDRKEEKGDSXRKWEWLHESKKNYQSMEKHTKLPGDKCXQPLGKTKLERKVSAKENRQAPVLLQTYRESWNGENIESVKQSRSPVSVFSWDNEXNDXDSWSXLFTEXSQGQRVIAHNTRAPFQRCNQ

SEQ ID NO: 3192 - protein, 75 aa, Homo sapiens
  MISC_FEATURE (3): Xaa equals any of the twenty naturally occurring L-amino acids
  MISC_FEATURE (5): Xaa equals any of the twenty naturally occurring L-amino acids
  MISC_FEATURE (17): Xaa equals any of the twenty naturally occurring L-amino acids
  MISC_FEATURE (18): Xaa equals any of the twenty naturally occurring L-amino acids
  MISC_FEATURE (38): Xaa equals any of the twenty naturally occurring L-amino acids
  MISC_FEATURE (42): Xaa equals any of the twenty naturally occurring L-amino acids
  MISC_FEATURE (45): Xaa equals any of the twenty naturally occurring L-amino acids
  MISC_FEATURE (46): Xaa equals any of the twenty naturally occurring L-amino acids
  MISC_FEATURE (54): Xaa equals any of the twenty naturally occurring L-amino acids
  MISC_FEATURE (56): Xaa equals any of the twenty naturally occurring L-amino acids
  MISC_FEATURE (58): Xaa equals any of the twenty naturally occurring L-amino acids
  MISC_FEATURE (59): Xaa equals any of the twenty naturally occurring L-amino acids
  MISC_FEATURE (60): Xaa equals any of the twenty naturally occurring L-amino acids
  MISC_FEATURE (73): Xaa equals any of the twenty naturally occurring L-amino acids
CIXSXGIAGVCGGHMDXXLSKRSREKTALEVSSIKAPXGICXLYXXIRWENERXEXLXXXRGREDLKDSMMAXWA

SEQ ID NO: 3193 - protein, 35 aa, Homo sapiens
  MISC_FEATURE (1): Xaa equals any of the twenty naturally occurring L-amino acids
  MISC_FEATURE (3): Xaa equals any of the twenty naturally occurring L-amino acids
  MISC_FEATURE (28): Xaa equals any of the twenty naturally occurring L-amino acids
  MISC_FEATURE (30): Xaa equals any of the twenty naturally occurring L-amino acids
XYXPVVEDFIKILREVDKALADDLETNXPXLKVQT

SEQ ID NO: 3194 - protein, 50 aa, Homo sapiens
  MISC_FEATURE (33): Xaa equals any of the twenty naturally occurring L-amino acids
  MISC_FEATURE (45): Xaa equals any of the twenty naturally occurring L-amino acids
  MISC_FEATURE (46): Xaa equals any of the twenty naturally occurring L-amino acids
NLIGRKNHDAYTINMNKCYIRKLTYLKSWLYWXYFLDSKNTNTSXXSIVL

SEQ ID NO: 3195 - protein, 44 aa, Homo sapiens
QPSKLDFVLFIHKRHLVIDFSELCMNAVVCVQNPLPERRVLSWR

SEQ ID NO: 3196 - protein, 157 aa, Homo sapiens
  MISC_FEATURE (147): Xaa equals any of the twenty naturally occurring L-amino acids
KIFMATINIVFDRVGKTDPVTRGIEITVNYLGIQFDVKFWSQHISFILVGIIIVTSIRGLLITLTKFFYAISSSKSSNVIVLLLAQIMGMYFVSSVLLIRMSMPLEYRTIITEVLGELQFNFYHRWFDVIFLVSALSSILFLYLVHXQAPLEANGHL

SEQ ID NO: 3197 - protein, 47 aa, Homo sapiens
NYGCSKMSEWELSSKFSQTQRQHCLLLNDYSFLPVFWYFLASFSPQP

SEQ ID NO: 3198 - protein, 58 aa, Homo sapiens
  MISC_FEATURE (47): Xaa equals any of the twenty naturally occurring L-amino acids
  MISC_FEATURE (51): Xaa equals any of the twenty naturally occurring L-amino acids
  MISC_FEATURE (53): Xaa equals any of the twenty naturally occurring L-amino acids
  MISC_FEATURE (57): Xaa equals any of the twenty naturally occurring L-amino acids
  MISC_FEATURE (58): Xaa equals any of the twenty naturally occurring L-amino acids
DDPTLLSSGRVQLVVGDGRMGYAEEAPYDAIHVGAAAPVVPQALIDXLKPXGXLILXX

SEQ ID NO: 3199 - protein, 109 aa, Homo sapiens
  MISC_FEATURE (82): Xaa equals any of the twenty naturally occurring L-amino acids
  MISC_FEATURE (100): Xaa equals any of the twenty naturally occurring L-amino acids
  MISC_FEATURE (109): Xaa equals any of the twenty naturally occurring L-amino acids
EERKARPQARLWATCPGSRCVQSQLRALPTPPSRRWCSFCLMGPVQLPAALARGWSEHFLLSGLLWELSSGTAGPAHVSVKXGYVALVSRPSASWQGKQXAGKSLKSAX

SEQ ID NO: 3200 - protein, 44 aa, Homo sapiens
  MISC_FEATURE (1): Xaa equals any of the twenty naturally occurring L-amino acids
  MISC_FEATURE (14): Xaa equals any of the twenty naturally occurring L-amino acids
  MISC_FEATURE (19): Xaa equals any of the twenty naturally occurring L-amino acids
  MISC_FEATURE (31): Xaa equals any of the twenty naturally occurring L-amino acids
  MISC_FEATURE (32): Xaa equals any of the twenty naturally occurring L-amino acids
  MISC_FEATURE (41): Xaa equals any of the twenty naturally occurring L-amino acids
XGVWVNQTFKLRAXRGGLXRAPLGPKGGLNXXGFPPGVNNXYPR

SEQ ID NO: 3201 - protein, 132 aa, Homo sapiens
  MISC_FEATURE (74): Xaa equals any of the twenty naturally occurring L-amino acids
  MISC_FEATURE (90): Xaa equals any of the twenty naturally occurring L-amino acids
  MISC_FEATURE (98): Xaa equals any of the twenty naturally occurring L-amino acids
  MISC_FEATURE (101): Xaa equals any of the twenty naturally occurring L-amino acids
PRVRPRVRAFKMSKRGRGGSSGAKFRISLGLPVGAVINCADNTGAKNLYIISVKGIKGRLNRLPAAGVGDMVMXTVKKGKPELRKKVHPXVVIRQRKXYRXKDGVFLYFEDNAGVIVNNKGRDERFCHYRTK

SEQ ID NO: 3202 - protein, 130 aa, Homo sapiens
  MISC_FEATURE (2): Xaa equals any of the twenty naturally occurring L-amino acids
  MISC_FEATURE (12): Xaa equals any of the twenty naturally occurring L-amino acids
FXSSLNTFRSEXRYSRNLPSLNLRWKLEVAGGASPASCMELELYGVDDKFYSKLDQEDALLGSYPVDDGCRIHVIDHSGARLGEYEDVSRVEKYTISQEAYDQRQDTVRSFLKRSKLGGTTRRSGSAGGQ

SEQ ID NO: 3203 - protein, 147 aa, Homo sapiens
  MISC_FEATURE (111): Xaa equals any of the twenty naturally occurring L-amino acids
  MISC_FEATURE (135): Xaa equals any of the twenty naturally occurring L-amino acids
  MISC_FEATURE (136): Xaa equals any of the twenty naturally occurring L-amino acids
RNAQPALGSPGPAAMAVEGGMKCVKFLLYVLLLAFCACAVGLIAVGVGAQLVLSQTIIQGATPGSLLPVVIIAVGVFLFLVAFVGCCGACKENYCLMITFAIFLSLIMLVXVAAAIAGYVFRDKVMSEFNNNFRXXMENYPKNNHTV

SEQ ID NO: 3204 - protein, 67 aa, Homo sapiens
GGYAGGLSSAYGGLTSPGLSYSLGSSFGSGAGSSSFSRTSSSRAVVVKKIETRDGKLVSESSDVLPK

SEQ ID NO: 3205 - protein, 63 aa, Homo sapiens
  MISC_FEATURE (19): Xaa equals any of the twenty naturally occurring L-amino acids
  MISC_FEATURE (40): Xaa equals any of the twenty naturally occurring L-amino acids
  MISC_FEATURE (42): Xaa equals any of the twenty naturally occurring L-amino acids
RRARGTGIRLTCRVPLDVXTSVAVEVLDIGHTGMLGKNCXYXFAIANKKATRRREWLSYWRTG

SEQ ID NO: 3206 - protein, 121 aa, Homo sapiens
  MISC_FEATURE (53): Xaa equals any of the twenty naturally occurring L-amino acids
  MISC_FEATURE (54): Xaa equals any of the twenty naturally occurring L-amino acids
  MISC_FEATURE (77): Xaa equals any of the twenty naturally occurring L-amino acids
  MISC_FEATURE (86): Xaa equals any of the twenty naturally occurring L-amino acids
  MISC_FEATURE (107): Xaa equals any of the twenty naturally occurring L-amino acids
  MISC_FEATURE (113): Xaa equals any of the twenty naturally occurring L-amino acids
  MISC_FEATURE (117): Xaa equals any of the twenty naturally occurring L-amino acids
  MISC_FEATURE (120): Xaa equals any of the twenty naturally occurring L-amino acids
  MISC_FEATURE (121): Xaa equals any of the twenty naturally occurring L-amino acids
NTDAALPTAAVDLRNLVIGCLRVIQITATIAWVVLTPAILIWFHLLIMVPFYXXWCLHSLTELLYKINSPYLLCHSXNRGHPSYSXIITKTPAAGCCFVPSLVQLDXKGLECXSCLXDGXX

SEQ ID NO: 3207 - protein, 55 aa, Homo sapiens
AGVLGTALSLLIRAELGQPGNLLGNDHIYNVIVTAHAFVIIFFIVIPIIIGGFGN

SEQ ID NO: 3208 - protein, 38 aa, Homo sapiens
KELGKSYPACLPKTSPLASPVLEGTAWPSDTCLTAAVP

SEQ ID NO: 3209 - protein, 63 aa, Homo sapiens
  MISC_FEATURE (12): Xaa equals any of the twenty naturally occurring L-amino acids
  MISC_FEATURE (18): Xaa equals any of the twenty naturally occurring L-amino acids
SQASTSNTPQPXALFFIXEYTNIIIINTLTTTIFLGTTYDALSPELYTTYFVTKTLLLTSLYL

SEQ ID NO: 3210 - protein, 86 aa, Homo sapiens
  MISC_FEATURE (1): Xaa equals any of the twenty naturally occurring L-amino acids
  MISC_FEATURE (2): Xaa equals any of the twenty naturally occurring L-amino acids
  MISC_FEATURE (10): Xaa equals any of the twenty naturally occurring L-amino acids
  MISC_FEATURE (28): Xaa equals any of the twenty naturally occurring L-amino acids
  MISC_FEATURE (37): Xaa equals any of the twenty naturally occurring L-amino acids
XXGIFRLILXKALRLQVPVRNSRVYPLXRLTPLLAMXSHKTFRIKRFLAKKQKQNRPIPQWIRMKTGNKIRYNSKRRHWRRTKLGL

SEQ ID NO: 3211 - protein, 63 aa, Homo sapiens
STHAMLSSLGFKLHITFRNWRAKILLVTAHQYKKAYLTYQNVFIAKLCFFLLILFIFIGMTNP

SEQ ID NO: 3212 - protein, 99 aa, Homo sapiens
  MISC_FEATURE (1): Xaa equals any of the twenty naturally occurring L-amino acids
  MISC_FEATURE (3): Xaa equals any of the twenty naturally occurring L-amino acids
  MISC_FEATURE (11): Xaa equals any of the twenty naturally occurring L-amino acids
  MISC_FEATURE (47): Xaa equals any of the twenty naturally occurring L-amino acids
  MISC_FEATURE (52): Xaa equals any of the twenty naturally occurring L-amino acids
  MISC_FEATURE (64): Xaa equals any of the twenty naturally occurring L-amino acids
XRXFRRFVEVXRVAHVSFGPHAGKLVAIVDVIDQNRALVDGPCTQVXETGHXFSSVMQLHCICXLKVSAQCPTRSMCRQAWAEGRTCNDKMGQPHGGAK

SEQ ID NO: 3213 - protein, 40 aa, Homo sapiens
EKNVEPFGKMKFSSSKFQRNVNILFHSIKNKTNSVFITFI

SEQ ID NO: 3214 - protein, 38 aa, Homo sapiens
  MISC_FEATURE (6): Xaa equals any of the twenty naturally occurring L-amino acids
  MISC_FEATURE (7): Xaa equals any of the twenty naturally occurring L-amino acids
  MISC_FEATURE (14): Xaa equals any of the twenty naturally occurring L-amino acids
PLGTLXXNVPVLDXGLAWSRPRYFLNLIAKDSKMHVLY

SEQ ID NO: 3215 - protein, 55 aa, Homo sapiens
  MISC_FEATURE (25): Xaa equals any of the twenty naturally occurring L-amino acids
LGSLVTAARVLEFRAAARAGQKPRXNWSESVNYLVDIHFEQVSNDLGSLKLHSNN

SEQ ID NO: 3216 - protein, 44 aa, Homo sapiens
  MISC_FEATURE (39): Xaa equals any of the twenty naturally occurring L-amino acids
  MISC_FEATURE (41): Xaa equals any of the twenty naturally occurring L-amino acids
GQNPTMLKQTKTYHVNKSIHLLEKKKKKKKKKKKKKKKXGXKKK

SEQ ID NO: 3217 - protein, 195 aa, Homo sapiens
  MISC_FEATURE (175): Xaa equals any of the twenty naturally occurring L-amino acids
  MISC_FEATURE (185): Xaa equals any of the twenty naturally occurring L-amino acids
  MISC_FEATURE (187): Xaa equals any of the twenty naturally occurring L-amino acids
  MISC_FEATURE (188): Xaa equals any of the twenty naturally occurring L-amino acids
LTHNKITKLGSFEGLVNLTFIHLQHNRLKEDAVSAAFKGLKSLEYLDLSFNQIARLPSGLPVSLLTLYLDNNKISNIPDEYFKRFNALQYLRLSHNELADSGIPGNSFNVSSLVELDLSYNKLKNIPTVNENLENYYLEVNQLEKFDIKSFCKILGPLSYSKIKHLRLDGNRISXTSLPPDMYEXLXXANEVTLN

SEQ ID NO: 3218 - protein, 172 aa, Homo sapiens
  MISC_FEATURE (165): Xaa equals any of the twenty naturally occurring L-amino acids
AFADSSSLVAASLAGVKMATNFLAHEKIWFDKFKYDDAERRFYEQMNGPVAGASRQENGASVILRDIARARENIQKSLAGSSAPGPSAAPAETTVSSSSGLPVWKWRTRVCVAWYRSLQQAISKLEARLNVLEKSSPGTGHGPTDPARISMRQVEPPAKNQPHQXRMTRMIP

SEQ ID NO: 3219 - protein, 85 aa, Homo sapiens
  MISC_FEATURE (29): Xaa equals any of the twenty naturally occurring L-amino acids
  MISC_FEATURE (43): Xaa equals any of the twenty naturally occurring L-amino acids
  MISC_FEATURE (81): Xaa equals any of the twenty naturally occurring L-amino acids
LLTHFHRGVGGGQQRRGASREGGGLDNSXVSREIESKEKERLXDPGGPSSERPSQAMLGRVRGQLSSGSWALLCQSRVVQXKPLS

SEQ ID NO: 3220 - protein, 170 aa, Homo sapiens
  MISC_FEATURE (3): Xaa equals any of the twenty naturally occurring L-amino acids
  MISC_FEATURE (4): Xaa equals any of the twenty naturally occurring L-amino acids
  MISC_FEATURE (90): Xaa equals any of the twenty naturally occurring L-amino acids
GYXXGSSGDIIEGTPAGTGPEFPGRPTRPDSSRWCHDNGVNYKIGEKWDRQGENGQMMSCTCLGNGKGEFKCDPHEATCYDDGKTYHVGXQWQKEYLGAICSCTCFGGQRGWRCDNCRRPGGEPSPEGTTGQSYNQYSQRYHQRTNTNVNCPIECFMPLDVQADREDSRE

SEQ ID NO: 3221 - protein, 155 aa, Homo sapiens
SRCSAEACLEPQITPSYYTTSDAVISTETVFIVEISLTCKNRGQNMALYADGGGKQFPVTRGQDVGRYQVSWSLDHKSAHAGTYEVRFFDEECYSLLRKAQRNNEDISIIPPLFTDSVDHRGTWNGPWMSTEVLAAAIGLEIYYLAFSAKSHIQA

SEQ ID NO: 3222 - protein, 62 aa, Homo sapiens
EWKGWSINSRVGLWGLGGAILKCGVGAAQEGGLLLSSCPLLHLLSQLPRFRESGTDCRGGAP

SEQ ID NO: 3223 - protein, 126 aa, Homo sapiens
WGGRARKLSQGPAASNPAPHLRSLTPARCPITASPWLPRVQVGARPGPHHMFPWPQSCPCSPTTATQRHPMKLFSRSLPNPSVQGSSPRRTVPGSAARRRSIRMGTVGSARAAAPVQTHMFCSSSS

SEQ ID NO: 3224 - protein, 55 aa, Homo sapiens
GSLLLVLSALKNRNSSVQVRGRKERPCEDLYLSHCTSLSLPCSLHELFCSSNSIL

SEQ ID NO: 3225 - protein, 55 aa, Homo sapiens
SSYSRILSVTHYMNKQILSSKECTRTTIKMSYYFESTKYTKRVCVYSRSYSLPFL

SEQ ID NO: 3226 - protein, 86 aa, Homo sapiens
GEGAWSLPWGGLLYSCGYLCPSPGGLSSAYGGLTSPGLSYSLGSSFGSGAGSSSFSRTSSSRAVVVKKIETRDGKLVSESSDVLPK

SEQ ID NO: 3227 - protein, 204 aa, Homo sapiens
  MISC_FEATURE (176): Xaa equals any of the twenty naturally occurring L-amino acids
  MISC_FEATURE (191): Xaa equals any of the twenty naturally occurring L-amino acids
  MISC_FEATURE (201): Xaa equals any of the twenty naturally occurring L-amino acids
  MISC_FEATURE (203): Xaa equals any of the twenty naturally occurring L-amino acids
AAAEAANCIMEVSCGQAESSEKPNAEDMTSKDYYFDSYAHFGIHEEMLKDEVRTLTYRNSMFHNRHLFKDKVVLDVGSGTGILCMFAAKAGARKVIGIECSSISDYAVKIVKANKLDHVVTIIKGKVEEVELPVEKVDIIISEWMGYCLFYESMLNTVLYARDKWLAPDGLNLPEXATLVCDGHRGPAVQXLPGSTGGKTXLXS

SEQ ID NO: 3228 - protein, 121 aa, Homo sapiens
SSRTACLRLGGPHQLSLPTAAKSPSAQLMEQVAQLKSLSDTVEKLKDEVLKETVSQRPGATVPTDFATFPSSAFLRAKEEQQDDTVYMGKVTFSCAAGFGQRHRLVLTQEQLHQLHSRLIS

SEQ ID NO: 3229 - protein, 57 aa, Homo sapiens
SLPQESEPQDKNHLLGSLLPCPPPFFLPLSFLFFLCSLEPSEKYQGTGVQLFLMIGH

SEQ ID NO: 3230 - protein, 45 aa, Homo sapiens
VPFYILKVEMSMFSTPIHKSIHKSLVQVYMIKRNVICLPFFALLK

SEQ ID NO: 3231 - protein, 123 aa, Homo sapiens
RESQVKHFKMRKIDLCLSSEGSEVILATSSDEKHPPENIIDGNPETFWTTTGMFPQEFIICFHKHVRIERLVIQSYFVQTLKIEKSTSKEPVDFEQWIEKDLVHTEGQLQNEEIVAHDGSATY

SEQ ID NO: 3232 - protein, 107 aa, Homo sapiens
GTGRIPDQLVILDMKHGVEAKNYEEIAKVEKLKPLEVELRRLEDLSESIVNDFAYMKKREEEMRDTNESTNTRVLYFSIFSMFCLIGLATWQVFYLRRFFKAKKLIE

SEQ ID NO: 3233 - protein, 55 aa, Homo sapiens
  MISC_FEATURE (47): Xaa equals any of the twenty naturally occurring L-amino acids
  MISC_FEATURE (49): Xaa equals any of the twenty naturally occurring L-amino acids
PKSIEAGVKSVLDHPLPNKAKTHLSCKKLKKKKKRAAALEDPSLRTXAXDVIALL

SEQ ID NO: 3234 - protein, 66 aa, Homo sapiens
  MISC_FEATURE (3): Xaa equals any of the twenty naturally occurring L-amino acids
FKXSLGDTIEGTPAGTGSGIPGSTHASGATSPHVGCPSWGREGQSVGWLGRGLALVGQPTPQPERA

SEQ ID NO: 3235 - protein, 81 aa, Homo sapiens
  MISC_FEATURE (2): Xaa equals any of the twenty naturally occurring L-amino acids
  MISC_FEATURE (7): Xaa equals any of the twenty naturally occurring L-amino acids
  MISC_FEATURE (8): Xaa equals any of the twenty naturally occurring L-amino acids
  MISC_FEATURE (14): Xaa equals any of the twenty naturally occurring L-amino acids
  MISC_FEATURE (15): Xaa equals any of the twenty naturally occurring L-amino acids
  MISC_FEATURE (21): Xaa equals any of the twenty naturally occurring L-amino acids
  MISC_FEATURE (27): Xaa equals any of the twenty naturally occurring L-amino acids
  MISC_FEATURE (28): Xaa equals any of the twenty naturally occurring L-amino acids
  MISC_FEATURE (29): Xaa equals any of the twenty naturally occurring L-amino acids
  MISC_FEATURE (31): Xaa equals any of the twenty naturally occurring L-amino acids
  MISC_FEATURE (32): Xaa equals any of the twenty naturally occurring L-amino acids
  MISC_FEATURE (36): Xaa equals any of the twenty naturally occurring L-amino acids
  MISC_FEATURE (37): Xaa equals any of the twenty naturally occurring L-amino acids
  MISC_FEATURE (38): Xaa equals any of the twenty naturally occurring L-amino acids
  MISC_FEATURE (39): Xaa equals any of the twenty naturally occurring L-amino acids
  MISC_FEATURE (42): Xaa equals any of the twenty naturally occurring L-amino acids
  MISC_FEATURE (43): Xaa equals any of the twenty naturally occurring L-amino acids
  MISC_FEATURE (44): Xaa equals any of the twenty naturally occurring L-amino acids
  MISC_FEATURE (45): Xaa equals any of the twenty naturally occurring L-amino acids
  MISC_FEATURE (47): Xaa equals any of the twenty naturally occurring L-amino acids
  MISC_FEATURE (51): Xaa equals any of the twenty naturally occurring L-amino acids
  MISC_FEATURE (54): Xaa equals any of the twenty naturally occurring L-amino acids
  MISC_FEATURE (55): Xaa equals any of the twenty naturally occurring L-amino acids
  MISC_FEATURE (57): Xaa equals any of the twenty naturally occurring L-amino acids
  MISC_FEATURE (59): Xaa equals any of the twenty naturally occurring L-amino acids
  MISC_FEATURE (62): Xaa equals any of the twenty naturally occurring L-amino acids
  MISC_FEATURE (63): Xaa equals any of the twenty naturally occurring L-amino acids
  MISC_FEATURE (66): Xaa equals any of the twenty naturally occurring L-amino acids
  MISC_FEATURE (69): Xaa equals any of the twenty naturally occurring L-amino acids
  MISC_FEATURE (72): Xaa equals any of the twenty naturally occurring L-amino acids
  MISC_FEATURE (73): Xaa equals any of the twenty naturally occurring L-amino acids
RXFIEDXXSHDFRXXKLLLDXIWVGFXXXPXXMNLXXXXIKXXXXVXLTPXEPXXYXHXLRXXREXVYXILXXLQYCPLSL

SEQ ID NO: 3236 - protein, 60 aa, Homo sapiens
  MISC_FEATURE (8): Xaa equals any of the twenty naturally occurring L-amino acids
  MISC_FEATURE (22): Xaa equals any of the twenty naturally occurring L-amino acids
  MISC_FEATURE (27): Xaa equals any of the twenty naturally occurring L-amino acids
  MISC_FEATURE (33): Xaa equals any of the twenty naturally occurring L-amino acids
  MISC_FEATURE (44): Xaa equals any of the twenty naturally occurring L-amino acids
  MISC_FEATURE (47): Xaa equals any of the twenty naturally occurring L-amino acids
  MISC_FEATURE (56): Xaa equals any of the twenty naturally occurring L-amino acids
GKVTEGLXFFTFSFSQVIFQVXRNDIXFRLKLXRDIRTNPTKWXFRXVGLFKGTIXINFC

SEQ ID NO: 3237 - protein, 56 aa, Homo sapiens
GVCMLLGFDSNQSKILLLDVGFWNRQAFLNRHDRIKTMFEANCPSSTVGMLGDDGI

SEQ ID NO: 3238 - protein, 99 aa, Homo sapiens
  MISC_FEATURE (68): Xaa equals any of the twenty naturally occurring L-amino acids
GNYSRREGTRGSSWSAQNTPRGNYNESRGGQSNFNRGPLPPLRPLSSTGYRPSPRDRASRGRGGLGPXWASANSGSGGSRGKFVSGGSGRGRHVRSFTR

SEQ ID NO: 3239 - protein, 29 aa, Homo sapiens
PLYLLHNELTRNNFARRAKAKTPETRRAT

SEQ ID NO: 3240 - protein, 163 aa, Homo sapiens
  MISC_FEATURE (136): Xaa equals any of the twenty naturally occurring L-amino acids
  MISC_FEATURE (138): Xaa equals any of the twenty naturally occurring L-amino acids
  MISC_FEATURE (147): Xaa equals any of the twenty naturally occurring L-amino acids
  MISC_FEATURE (149): Xaa equals any of the twenty naturally occurring L-amino acids
  MISC_FEATURE (155): Xaa equals any of the twenty naturally occurring L-amino acids
  MISC_FEATURE (162): Xaa equals any of the twenty naturally occurring L-amino acids
DPSPFGTSATGGSSDLAQVRNFKLEQEQEKNKILSEALETLATEHHELEQSLVKGSPPASILSEDEFYDALSDSESERSLSRLEAVTARSFEEEGEHLGSRKHRMSEEKDCGGGDALSNGIQETQNKFAFSYVFQXWXSVSGASSEXCXWIGTYXKFTLPFXI

SEQ ID NO: 3241 - protein, 42 aa, Homo sapiens
KLSGPYPENVGYTLPVLINPLAQPVIYSPIFAGTLITALSSH

SEQ ID NO: 3242 - protein, 133 aa, Homo sapiens
  MISC_FEATURE (112): Xaa equals any of the twenty naturally occurring L-amino acids
  MISC_FEATURE (120): Xaa equals any of the twenty naturally occurring L-amino acids
VHRWESPPQTAGHESRQEKRSLYRRGEEASSLQVGRAGEQWPGGGRLCAAASAHSSPARCRPGTVALREIRRYQKSTELLIRKLPFQRLVREIAQDFKTDLRFQSASIGALXEASEPYLXGSVPRYQPVCHPP

SEQ ID NO: 3243 - protein, 63 aa, Homo sapiens
  MISC_FEATURE (44): Xaa equals any of the twenty naturally occurring L-amino acids
  MISC_FEATURE (48): Xaa equals any of the twenty naturally occurring L-amino acids
  MISC_FEATURE (55): Xaa equals any of the twenty naturally occurring L-amino acids
  MISC_FEATURE (58): Xaa equals any of the twenty naturally occurring L-amino acids
  MISC_FEATURE (63): Xaa equals any of the twenty naturally occurring L-amino acids
RPKWRRVPCEQQLNMGQSVLRDGRAPFRRDGRWPPLPSADSKRXSFRXPESGVAXMGXREGSX

SEQ ID NO: 3244 - protein, 107 aa, Homo sapiens
  MISC_FEATURE (38): Xaa equals any of the twenty naturally occurring L-amino acids
  MISC_FEATURE (87): Xaa equals any of the twenty naturally occurring L-amino acids
  MISC_FEATURE (93): Xaa equals any of the twenty naturally occurring L-amino acids
  MISC_FEATURE (98): Xaa equals any of the twenty naturally occurring L-amino acids
DADVQFLASVLPPDTDPAFFEHLRALDCSEVTVRALPXGSLAFPGVPLLQVSGPLLVVQLLETPLLCLVSYASLVATNAARLSLDRXAREAAXRDWAXAGSRARLGA

SEQ ID NO: 3245 - protein, 89 aa, Homo sapiens
SAEEKKLTRIPSVTASEQGRAQRRIPAPRRGAGHVAYGRPAPRRRSWGAQVLLIEAQPVDGVRPVAAPGAPGPGLPGVGLLGNAAQSGW

SEQ ID NO: 3246 - protein, 44 aa, Homo sapiens
AVLLLLSLPVLAAGITILLTDRNLNTTFFDPAGGGDPILYQHLF

SEQ ID NO: 3247 - protein, 70 aa, Homo sapiens
  MISC_FEATURE (28): Xaa equals any of the twenty naturally occurring L-amino acids
  MISC_FEATURE (49): Xaa equals any of the twenty naturally occurring L-amino acids
  MISC_FEATURE (53): Xaa equals any of the twenty naturally occurring L-amino acids
PASLQSVLAVYYLVAKQGRSKDYLDNPXFSLAIFLDSVICLVRFTCVNXVYAXGKKKKKTRGGARNPFPP

SEQ ID NO: 3248 - protein, 83 aa, Homo sapiens
RASTSEWPHLCPRCCRHLVLRLLSLSVPSLSSQANSSQTPRDSDACPHPGLVPGPSLAPSRSWPRGPGAWTVWALSLPCLLFS

SEQ ID NO: 3249 - protein, 241 aa, Homo sapiens
  MISC_FEATURE (56): Xaa equals any of the twenty naturally occurring L-amino acids
SWYACRYRSGIPGSTHASESIHRSWDAINRLSNTGSGLQWLTGALHLCSPLTSQDXQHLKDWISETWVNLAMVDYPYASNFLQPLPAWPIKVVCQYLKNPNVSDSLLLQNIFQALNVYYNYSGQVKCLNISETATSSLGTLGWSYQACTEVVMPFCTNGVDDMFEPHSWNLKELSDDCFQQWGVRPRPSWITTMYGGKNISSHTNIGFSNGELDPWSGGGVTKDITDTLGCSHHLKRGPPT

SEQ ID NO: 3250 - protein, 91 aa, Homo sapiens
PRVRPRVRPRVRFAAGYNVKFDMFSKICVNGDDAHPLWKWMKIQPKGKGILGNAIKWNFTKFLIDKNGCVVKRYGPMEEPLVIEKDLPHYF

SEQ ID NO: 3251 - protein, 105 aa, Homo sapiens
  MISC_FEATURE (2): Xaa equals any of the twenty naturally occurring L-amino acids
  MISC_FEATURE (17): Xaa equals any of the twenty naturally occurring L-amino acids
  MISC_FEATURE (20): Xaa equals any of the twenty naturally occurring L-amino acids
  MISC_FEATURE (27): Xaa equals any of the twenty naturally occurring L-amino acids
  MISC_FEATURE (43): Xaa equals any of the twenty naturally occurring L-amino acids
  MISC_FEATURE (55): Xaa equals any of the twenty naturally occurring L-amino acids
  MISC_FEATURE (56): Xaa equals any of the twenty naturally occurring L-amino acids
  MISC_FEATURE (69): Xaa equals any of the twenty naturally occurring L-amino acids
  MISC_FEATURE (79): Xaa equals any of the twenty naturally occurring L-amino acids
  MISC_FEATURE (92): Xaa equals any of the twenty naturally occurring L-amino acids
  MISC_FEATURE (94): Xaa equals any of the twenty naturally occurring L-amino acids
  MISC_FEATURE (105): Xaa equals any of the twenty naturally occurring L-amino acids
KXGVYNPIKIFGVTTLXIVXANTFVAXLKGLDPARVNVPVIGXHAGKTIIPLISXXTPKVDFPQDQLTXLTGPDPGGRXGKWSRLKPEHALXPXSWGKPGAPFGX

SEQ ID NO: 3252 - protein, 91 aa, Homo sapiens
  MISC_FEATURE (19): Xaa equals any of the twenty naturally occurring L-amino acids
  MISC_FEATURE (37): Xaa equals any of the twenty naturally occurring L-amino acids
  MISC_FEATURE (56): Xaa equals any of the twenty naturally occurring L-amino acids
  MISC_FEATURE (78): Xaa equals any of the twenty naturally occurring L-amino acids
  MISC_FEATURE (89): Xaa equals any of the twenty naturally occurring L-amino acids
RHFCPFCIRNRSKQGVYTXYGSLMKYYYFTSWGMFGXFRNELMITTKGEFMTAFSXRKSLGPRLPMMGSFSTPLLFHXSILFTNFLLGXFL

SEQ ID NO: 3253 - protein, 174 aa, Homo sapiens
RTRGLYWTHVKEQLETLRKLQRREVAEQWLRPAEEDHLEDSLEDLGAADDFLEPEEYMEPEGADPREAADLDAVPMSLSYEELVRRNVELFIATSQKFVQETELSQRIRDWEDTVQPLLQEQEQHVPFDIHTYGDQLVSRFPQLNEWCPFAELVAGQPGLRGVSFHAGLPAAGQ

SEQ ID NO: 3254 - protein, 104 aa, Homo sapiens
KPKWERKRLISTLSSLDTVDSGKSTTTGHLIYKCGGIDKRTIEKFEKEAAEMGKGSFKYAWVLDKLKAERERGITIDISLWKFETSKYYVTIIDAPGHRDFIKT

SEQ ID NO: 3255 - protein, 115 aa, Homo sapiens
  MISC_FEATURE (105): Xaa equals any of the twenty naturally occurring L-amino acids
AKMGAYKYIQELWRKKQSDVMRFLLRVRCWQYRQLSALHRAPRPTRPDKARRLGYKAKQGYVIYRIRVRRGGRKRPVPKGATYGKPVHHGVNQLKFARSLQSRCXGTELDATWGF

SEQ ID NO: 3256 - protein, 68 aa, Homo sapiens
  MISC_FEATURE (10): Xaa equals any of the twenty naturally occurring L-amino acids
  MISC_FEATURE (13): Xaa equals any of the twenty naturally occurring L-amino acids
  MISC_FEATURE (18): Xaa equals any of the twenty naturally occurring L-amino acids
  MISC_FEATURE (46): Xaa equals any of the twenty naturally occurring L-amino acids
  MISC_FEATURE (48): Xaa equals any of the twenty naturally occurring L-amino acids
  MISC_FEATURE (52): Xaa equals any of the twenty naturally occurring L-amino acids
  MISC_FEATURE (58): Xaa equals any of the twenty naturally occurring L-amino acids
PQTYCVERSXREXVGFEXVDGGGEGRPPELSLMQSFLAMKNLSVIXLXIKFXVFKKTXYFVHLRFCTP

SEQ ID NO: 3257 - protein, 49 aa, Homo sapiens
  MISC_FEATURE (31): Xaa equals any of the twenty naturally occurring L-amino acids
LPGKAVSPAGTGPEFPGRPTRPLRVFCAIMXQYGGRILWRNGDSLHDHK

SEQ ID NO: 3258 - protein, 152 aa, Homo sapiens
  MISC_FEATURE (54): Xaa equals any of the twenty naturally occurring L-amino acids
  MISC_FEATURE (142): Xaa equals any of the twenty naturally occurring L-amino acids
  MISC_FEATURE (149): Xaa equals any of the twenty naturally occurring L-amino acids
YKLLRFLTCILFFKIPVRMFKVFIYLYIFFESVLCKTWFWLFAHSGEAGAAVVXVAGVGGGWELWPRLSGRSRGSKLTYACMRRHSSSIVSPKFNSLAVVLQRRDWENPGVTQLNRLAAHPPFASWRNSEEARTDRPSQQLXQSEWRMXRAL

SEQ ID NO: 3259 - protein, 125 aa, Homo sapiens
  MISC_FEATURE (3): Xaa equals any of the twenty naturally occurring L-amino acids
  MISC_FEATURE (14): Xaa equals any of the twenty naturally occurring L-amino acids
  MISC_FEATURE (51): Xaa equals any of the twenty naturally occurring L-amino acids
  MISC_FEATURE (75): Xaa equals any of the twenty naturally occurring L-amino acids
  MISC_FEATURE (84): Xaa equals any of the twenty naturally occurring L-amino acids
  MISC_FEATURE (101): Xaa equals any of the twenty naturally occurring L-amino acids
  MISC_FEATURE (108): Xaa equals any of the twenty naturally occurring L-amino acids
  MISC_FEATURE (115): Xaa equals any of the twenty naturally occurring L-amino acids
CQXYILQEYWPEGXAEACCCTGATPIAGRFTPGTFTNQIQAAFREPRLLEXTDPRADHQPLTEASYVNLPTIALXNTDSPLRYXDIAIPCNKQGSSLSGFXVADACSXRSAQCVXPFPVNTHGEG

SEQ ID NO: 3260 - protein, 117 aa, Homo sapiens
  MISC_FEATURE (27): Xaa equals any of the twenty naturally occurring L-amino acids
  MISC_FEATURE (59): Xaa equals any of the twenty naturally occurring L-amino acids
  MISC_FEATURE (80): Xaa equals any of the twenty naturally occurring L-amino acids
  MISC_FEATURE (85): Xaa equals any of the twenty naturally occurring L-amino acids
  MISC_FEATURE (90): Xaa equals any of the twenty naturally occurring L-amino acids
  MISC_FEATURE (103): Xaa equals any of the twenty naturally occurring L-amino acids
  MISC_FEATURE (106): Xaa equals any of the twenty naturally occurring L-amino acids
  MISC_FEATURE (113): Xaa equals any of the twenty naturally occurring L-amino acids
KKKKKNSRGGPVPNSPYSESYYNSLAXVLQRRDWENPGVTQLNRLAAHPPFASWRNSEXARTDRPSQQLRSLNGRMANCXALIFXVNISXKIFAKSAHFLTNXPEXGKIPYKXNRIR

SEQ ID NO: 3261 - protein, 67 aa, Homo sapiens
  MISC_FEATURE (26): Xaa equals any of the twenty naturally occurring L-amino acids
  MISC_FEATURE (51): Xaa equals any of the twenty naturally occurring L-amino acids
  MISC_FEATURE (53): Xaa equals any of the twenty naturally occurring L-amino acids
  MISC_FEATURE (61): Xaa equals any of the twenty naturally occurring L-amino acids
  MISC_FEATURE (65): Xaa equals any of the twenty naturally occurring L-amino acids
  MISC_FEATURE (67): Xaa equals any of the twenty naturally occurring L-amino acids
QALSTGLPIPTRPCTHPLRNLSPVPXPSLSTWRCLMPRRALSQFWEDDSKXLXALGHPLTXATQXWX

SEQ ID NO: 3262 - protein, 60 aa, Homo sapiens
VVKAFVVLNPDYKSHDQEQLIKEIQEHVKKTTAPYKYPRKVGMYPLFNQKLVVIYHILGI

SEQ ID NO: 3263 - protein, 112 aa, Homo sapiens
  MISC_FEATURE (84): Xaa equals any of the twenty naturally occurring L-amino acids
  MISC_FEATURE (100): Xaa equals any of the twenty naturally occurring L-amino acids
GEKLQSFDSPERKRIKYSRETDSDRKLVDKEDIDTSSKGGCVQQATGWRKGTGLGYGHPGLASSEEAEGRMRGPSVGASGRTSXRQSNETYRDAFPKKSXLLDIKNSIKKGD

SEQ ID NO: 3264 - protein, 147 aa, Homo sapiens
  MISC_FEATURE (21): Xaa equals any of the twenty naturally occurring L-amino acids
FFFIEAAELVGGGGRADANMXIFVKTLTGKTITLEVEPSDTIENVKAKIQDKEGIPPDQQRLIFAGKQLEDGRTLSDYNIQKESTLHLVLRLRGGIIEPSLRQLAQKYNCDKMICRKCYARLHPRAVNCRKKKCGHTNNLRPKKKVK

SEQ ID NO: 3265 - protein, 109 aa, Homo sapiens
  MISC_FEATURE (2): Xaa equals any of the twenty naturally occurring L-amino acids
  MISC_FEATURE (4): Xaa equals any of the twenty naturally occurring L-amino acids
  MISC_FEATURE (5): Xaa equals any of the twenty naturally occurring L-amino acids
  MISC_FEATURE (6): Xaa equals any of the twenty naturally occurring L-amino acids
  MISC_FEATURE (7): Xaa equals any of the twenty naturally occurring L-amino acids
  MISC_FEATURE (34): Xaa equals any of the twenty naturally occurring L-amino acids
  MISC_FEATURE (37): Xaa equals any of the twenty naturally occurring L-amino acids
  MISC_FEATURE (40): Xaa equals any of the twenty naturally occurring L-amino acids
  MISC_FEATURE (49): Xaa equals any of the twenty naturally occurring L-amino acids
  MISC_FEATURE (54): Xaa equals any of the twenty naturally occurring L-amino acids
  MISC_FEATURE (55): Xaa equals any of the twenty naturally occurring L-amino acids
  MISC_FEATURE (58): Xaa equals any of the twenty naturally occurring L-amino acids
  MISC_FEATURE (60): Xaa equals any of the twenty naturally occurring L-amino acids
  MISC_FEATURE (61): Xaa equals any of the twenty naturally occurring L-amino acids
  MISC_FEATURE (62): Xaa equals any of the twenty naturally occurring L-amino acids
  MISC_FEATURE (63): Xaa equals any of the twenty naturally occurring L-amino acids
  MISC_FEATURE (71): Xaa equals any of the twenty naturally occurring L-amino acids
  MISC_FEATURE (74): Xaa equals any of the twenty naturally occurring L-amino acids
  MISC_FEATURE (75): Xaa equals any of the twenty naturally occurring L-amino acids
  MISC_FEATURE (76): Xaa equals any of the twenty naturally occurring L-amino acids
  MISC_FEATURE (78): Xaa equals any of the twenty naturally occurring L-amino acids
  MISC_FEATURE (84): Xaa equals any of the twenty naturally occurring L-amino acids
  MISC_FEATURE (85): Xaa equals any of the twenty naturally occurring L-amino acids
  MISC_FEATURE (89): Xaa equals any of the twenty naturally occurring L-amino acids
  MISC_FEATURE (91): Xaa equals any of the twenty naturally occurring L-amino acids
  MISC_FEATURE (95): Xaa equals any of the twenty naturally occurring L-amino acids
  MISC_FEATURE (97): Xaa equals any of the twenty naturally occurring L-amino acids
  MISC_FEATURE (100): Xaa equals any of the twenty naturally occurring L-amino acids
  MISC_FEATURE (101): Xaa equals any of the twenty naturally occurring L-amino acids
  MISC_FEATURE (102): Xaa equals any of the twenty naturally occurring L-amino acids
  MISC_FEATURE (104): Xaa equals any of the twenty naturally occurring L-amino acids
RXGXXXXFWNYNNQSSNFGPMKGGNFGGRSFGPXCGXSQXFGKTRNQGXYLRFXXRKXFXXXXKILIRKQXLTXXXSXKNDREXXGYHXFXNLSXHXGGXXXIXPRRHV

SEQ ID NO: 3266 - protein, 53 aa, Homo sapiens
  MISC_FEATURE (3): Xaa equals any of the twenty naturally occurring L-amino acids
  MISC_FEATURE (7): Xaa equals any of the twenty naturally occurring L-amino acids
  MISC_FEATURE (13): Xaa equals any of the twenty naturally occurring L-amino acids
  MISC_FEATURE (25): Xaa equals any of the twenty naturally occurring L-amino acids
  MISC_FEATURE (39): Xaa equals any of the twenty naturally occurring L-amino acids
SKXYKGXLSYLNXTRKDYWQVHLDXVEVASGLTLCKEGXEAIVDTGTSLMVGP

SEQ ID NO: 3267 - protein, 64 aa, Homo sapiens
  MISC_FEATURE (34): Xaa equals any of the twenty naturally occurring L-amino acids
  MISC_FEATURE (42): Xaa equals any of the twenty naturally occurring L-amino acids
  MISC_FEATURE (53): Xaa equals any of the twenty naturally occurring L-amino acids
  MISC_FEATURE (63): Xaa equals any of the twenty naturally occurring L-amino acids
FCFLFKFYLLGKDFFFLGRKLGIFRRRYLTLQCXNEFNSSTXVFPFNRLYVYXGFLMGFFLFXF

SEQ ID NO: 3268 - protein, 237 aa, Homo sapiens
  MISC_FEATURE (1): Xaa equals any of the twenty naturally occurring L-amino acids
  MISC_FEATURE (3): Xaa equals any of the twenty naturally occurring L-amino acids
  MISC_FEATURE (210): Xaa equals any of the twenty naturally occurring L-amino acids
  MISC_FEATURE (234): Xaa equals any of the twenty naturally occurring L-amino acids
XRXTIAFGKHVPQVPVRNSRVDPRVRRAGGAIMGVDIRHNKDRKVRRKEPKSQDIYLRLLVKLYRFLARRTNSTFNQVVLKRLFMSRTNRPPLSLSRMIRKMKLPGRENKTAVVVGTITDDVRVQEVPKLKVCALRVTSRARSRILRAGGKILTFDQLALDSPKGCGTVLLSGPRKGREVYRHFGKAPGTPHSHTKPYVRSKGAEVRACXRPTGQPRLQKTKPWDPTLLLKKNXCLQ

SEQ ID NO: 3269 - protein, 122 aa, Homo sapiens
  MISC_FEATURE (13): Xaa equals any of the twenty naturally occurring L-amino acids
  MISC_FEATURE (18): Xaa equals any of the twenty naturally occurring L-amino acids
  MISC_FEATURE (21): Xaa equals any of the twenty naturally occurring L-amino acids
  MISC_FEATURE (22): Xaa equals any of the twenty naturally occurring L-amino acids
  MISC_FEATURE (26): Xaa equals any of the twenty naturally occurring L-amino acids
  MISC_FEATURE (27): Xaa equals any of the twenty naturally occurring L-amino acids
  MISC_FEATURE (30): Xaa equals any of the twenty naturally occurring L-amino acids
  MISC_FEATURE (33): Xaa equals any of the twenty naturally occurring L-amino acids
  MISC_FEATURE (34): Xaa equals any of the twenty naturally occurring L-amino acids
  MISC_FEATURE (41): Xaa equals any of the twenty naturally occurring L-amino acids
  MISC_FEATURE (43): Xaa equals any of the twenty naturally occurring L-amino acids
  MISC_FEATURE (47): Xaa equals any of the twenty naturally occurring L-amino acids
  MISC_FEATURE (48): Xaa equals any of the twenty naturally occurring L-amino acids
  MISC_FEATURE (52): Xaa equals any of the twenty naturally occurring L-amino acids
  MISC_FEATURE (55): Xaa equals any of the twenty naturally occurring L-amino acids
  MISC_FEATURE (56): Xaa equals any of the twenty naturally occurring L-amino acids
  MISC_FEATURE (57): Xaa equals any of the twenty naturally occurring L-amino acids
  MISC_FEATURE (59): Xaa equals any of the twenty naturally occurring L-amino acids
  MISC_FEATURE (60): Xaa equals any of the twenty naturally occurring L-amino acids
  MISC_FEATURE (74): Xaa equals any of the twenty naturally occurring L-amino acids
  MISC_FEATURE (76): Xaa equals any of the twenty naturally occurring L-amino acids
  MISC_FEATURE (81): Xaa equals any of the twenty naturally occurring L-amino acids
  MISC_FEATURE (84): Xaa equals any of the twenty naturally occurring L-amino acids
  MISC_FEATURE (88): Xaa equals any of the twenty naturally occurring L-amino acids
  MISC_FEATURE (90): Xaa equals any of the twenty naturally occurring L-amino acids
  MISC_FEATURE (94): Xaa equals any of the twenty naturally occurring L-amino acids
  MISC_FEATURE (96): Xaa equals any of the twenty naturally occurring L-amino acids
  MISC_FEATURE (97): Xaa equals any of the twenty naturally occurring L-amino acids
  MISC_FEATURE (100): Xaa equals any of the twenty naturally occurring L-amino acids
  MISC_FEATURE (110): Xaa equals any of the twenty naturally occurring L-amino acids
  MISC_FEATURE (113): Xaa equals any of the twenty naturally occurring L-amino acids
  MISC_FEATURE (115): Xaa equals any of the twenty naturally occurring L-amino acids
  MISC_FEATURE (117): Xaa equals any of the twenty naturally occurring L-amino acids
  MISC_FEATURE (121): Xaa equals any of the twenty naturally occurring L-amino acids
PQCNLQFPLKKKXVNLAXIEXXMGIXXSYXIYXXINIFKLXVXHSQXXGSLXIKXXXIXXPVGFLLTALVLIVXKXYAHLXLAXVLIXPXVNPXAXXANXNWGILFIRAXEKXSXSXQHHXN

SEQ ID NO: 3270 - protein, 73 aa, Homo sapiens
GLVPDLPEDLYHLIKKAVAVRKHLERNRKDKDAKFRLILIESRIHRLARYYKTKRVLPPNWKYESSTASALVA

SEQ ID NO: 3271 - protein, 67 aa, Homo sapiens
  MISC_FEATURE (14): Xaa equals any of the twenty naturally occurring L-amino acids
  MISC_FEATURE (21): Xaa equals any of the twenty naturally occurring L-amino acids
  MISC_FEATURE (33): Xaa equals any of the twenty naturally occurring L-amino acids
  MISC_FEATURE (38): Xaa equals any of the twenty naturally occurring L-amino acids
  MISC_FEATURE (41): Xaa equals any of the twenty naturally occurring L-amino acids
  MISC_FEATURE (50): Xaa equals any of the twenty naturally occurring L-amino acids
  MISC_FEATURE (57): Xaa equals any of the twenty naturally occurring L-amino acids
  MISC_FEATURE (63): Xaa equals any of the twenty naturally occurring L-amino acids
  MISC_FEATURE (65): Xaa equals any of the twenty naturally occurring L-amino acids
HRFLKTRILNVKHXISLVTSXPKIMCCQNQTQXHEYGXYYXETWTLSLLXLFCSKYXQGFKHXSXTE

SEQ ID NO: 3272 - protein, 81 aa, Homo sapiens
  MISC_FEATURE (10): Xaa equals any of the twenty naturally occurring L-amino acids
  MISC_FEATURE (11): Xaa equals any of the twenty naturally occurring L-amino acids
  MISC_FEATURE (36): Xaa equals any of the twenty naturally occurring L-amino acids
  MISC_FEATURE (38): Xaa equals any of the twenty naturally occurring L-amino acids
  MISC_FEATURE (42): Xaa equals any of the twenty naturally occurring L-amino acids
  MISC_FEATURE (58): Xaa equals any of the twenty naturally occurring L-amino acids
  MISC_FEATURE (73): Xaa equals any of the twenty naturally occurring L-amino acids
  MISC_FEATURE (79): Xaa equals any of the twenty naturally occurring L-amino acids
TLNTNWKDLXXKSNNLKGRHSLVFLNSGILGLEKQXLXESPXFRKFSHGKAPIRGPIXRGFLKELGVHKTLSXGNRNGXRK

SEQ ID NO: 3273 - protein, 60 aa, Homo sapiens
WIAKLVAWWKLEQTNILCQKFKSSIGGGAVLSNKCVTLKLCSFALGAAVMLMKIPGSFVQ

SEQ ID NO: 3274 - protein, 45 aa, Homo sapiens
  MISC_FEATURE (3): Xaa equals any of the twenty naturally occurring L-amino acids
  MISC_FEATURE (4): Xaa equals any of the twenty naturally occurring L-amino acids
  MISC_FEATURE (6): Xaa equals any of the twenty naturally occurring L-amino acids
  MISC_FEATURE (17): Xaa equals any of the twenty naturally occurring L-amino acids
  MISC_FEATURE (25): Xaa equals any of the twenty naturally occurring L-amino acids
  MISC_FEATURE (37): Xaa equals any of the twenty naturally occurring L-amino acids
  MISC_FEATURE (39): Xaa equals any of the twenty naturally occurring L-amino acids
  MISC_FEATURE (42): Xaa equals any of the twenty naturally occurring L-amino acids
  MISC_FEATURE (44): Xaa equals any of the twenty naturally occurring L-amino acids
SKXXRXSLPTWNKPDLXTEGMKNNXYITPELFKECFXVXTKXFXE

SEQ ID NO: 3275 - protein, 131 aa, Homo sapiens
  MISC_FEATURE (1): Xaa equals any of the twenty naturally occurring L-amino acids
  MISC_FEATURE (3): Xaa equals any of the twenty naturally occurring L-amino acids
  MISC_FEATURE (10): Xaa equals any of the twenty naturally occurring L-amino acids
  MISC_FEATURE (47): Xaa equals any of the twenty naturally occurring L-amino acids
  MISC_FEATURE (51): Xaa equals any of the twenty naturally occurring L-amino acids
  MISC_FEATURE (86): Xaa equals any of the twenty naturally occurring L-amino acids
  MISC_FEATURE (87): Xaa equals any of the twenty naturally occurring L-amino acids
  MISC_FEATURE (90): Xaa equals any of the twenty naturally occurring L-amino acids
  MISC_FEATURE (99): Xaa equals any of the twenty naturally occurring L-amino acids
  MISC_FEATURE (114): Xaa equals any of the twenty naturally occurring L-amino acids
  MISC_FEATURE (123): Xaa equals any of the twenty naturally occurring L-amino acids
XRXDHQGTFXNRGKICFIPRYRFQSNHMDMVRIESPEEISLLPKTSXNIPXPGEGDVREEALSTGGLDLIFMPGLGFDKHGNPTGXXARXTMMPILSAXLQHQEVKPYTLALLXKNRFAFSPXNENDLKVD

SEQ ID NO: 3276 - protein, 137 aa, Homo sapiens
  MISC_FEATURE (62): Xaa equals any of the twenty naturally occurring L-amino acids
  MISC_FEATURE (133): Xaa equals any of the twenty naturally occurring L-amino acids
VDRQLHNRQIYPPINVLPSLSRLMKSAIGEGMTRKDHGDVSNQLYACYAIGKDVQAMKAVVXEEALTSEDLLYLEFLQKFEKNFINQGPYENRSVFESLDLGWKLLRIFPKEMLKRIPQAVIDEFYSREGALXGPRA

SEQ ID NO: 3277 - protein, 223 aa, Homo sapiens
  MISC_FEATURE (199): Xaa equals any of the twenty naturally occurring L-amino acids
  MISC_FEATURE (202): Xaa equals any of the twenty naturally occurring L-amino acids
  MISC_FEATURE (204): Xaa equals any of the twenty naturally occurring L-amino acids
  MISC_FEATURE (207): Xaa equals any of the twenty naturally occurring L-amino acids
  MISC_FEATURE (208): Xaa equals any of the twenty naturally occurring L-amino acids
  MISC_FEATURE (217): Xaa equals any of the twenty naturally occurring L-amino acids
AQRMRAGKGKMRNRRRIQRRGPCIIYNEDNGIIKAFRNIPGITLLNVSKLNILKLAPGGHVGRFCIWTESAFRKLDELYGTWRKAASLKSNYNLPMHKMINTDLSRILKSPEIQRALRAPRKKIHRRVLKKNPLKNLRIMLKLNPYAKTMRRNTILRQARNHKLRVDKAAAAAAALQAKSDEKAAVAGKKPVVGKKGKXAAXGXKNXXSLWWEKRQXLPRTQP

SEQ ID NO: 3278 - protein, 59 aa, Homo sapiens
  MISC_FEATURE (16): Xaa equals any of the twenty naturally occurring L-amino acids
  MISC_FEATURE (25): Xaa equals any of the twenty naturally occurring L-amino acids
  MISC_FEATURE (36): Xaa equals any of the twenty naturally occurring L-amino acids
  MISC_FEATURE (56): Xaa equals any of the twenty naturally occurring L-amino acids
NELLLIHFCKQLIAWXNFFKFTFFXLGEMNVQKKKXNCWLFVLFWMYKNQWKKITXKLK

SEQ ID NO: 3279 - protein, 126 aa, Homo sapiens
  MISC_FEATURE (100): Xaa equals any of the twenty naturally occurring L-amino acids
  MISC_FEATURE (120): Xaa equals any of the twenty naturally occurring L-amino acids
QDEGAEPTGYSAELSSEGIRDDRNEEKRITEAEKNERVQRQLLTLSSELSQARDENKRTHNDIIHNENMRQGRDKYKTLRQIRQGNTKQRIDEVRGPVTXQARTKGRGVLIAALQPRTLXSLVLQV

SEQ ID NO: 3280 - protein, 191 aa, Homo sapiens
  MISC_FEATURE (11): Xaa equals any of the twenty naturally occurring L-amino acids
  MISC_FEATURE (53): Xaa equals any of the twenty naturally occurring L-amino acids
  MISC_FEATURE (68): Xaa equals any of the twenty naturally occurring L-amino acids
  MISC_FEATURE (85): Xaa equals any of the twenty naturally occurring L-amino acids
  MISC_FEATURE (119): Xaa equals any of the twenty naturally occurring L-amino acids
  MISC_FEATURE (122): Xaa equals any of the twenty naturally occurring L-amino acids
  MISC_FEATURE (137): Xaa equals any of the twenty naturally occurring L-amino acids
  MISC_FEATURE (145): Xaa equals any of the twenty naturally occurring L-amino acids
  MISC_FEATURE (153): Xaa equals any of the twenty naturally occurring L-amino acids
  MISC_FEATURE (166): Xaa equals any of the twenty naturally occurring L-amino acids
GKLVINGNPIXIFQERDPSKIKWGDAGAEYVVESTGVFTTMEKAGAHLQGGAXRVIISAPSADAPMFXMGVNHEKYDNSLKIISXAFCTTNCLAPLAKVIHDNFGIVEGLMTTVHAITXTQXTVDGPSGKLWRDGRXALQNIIPXSTGAAKAXGKVIPELNGKLTXMAFPCPHCQRVSGGPDLPSRKTCQI

SEQ ID NO: 3281 - protein, 143 aa, Homo sapiens
  MISC_FEATURE (140): Xaa equals any of the twenty naturally occurring L-amino acids
GVAFSLGFTLGPMLGASLPLEMAPWFALLFAASDLLFIFCFLPETLPLEKRAPSIALGFRDAADLLSPLALPCTNTPAPSKAGGRQSPESCRARAVLRLPCPPAGPPAAGCPPSSSSAGDVLCPCWAWGCCSTPLPPPLXCPA

SEQ ID NO: 3282 - protein, 50 aa, Homo sapiens
SHPIAKRVISQPGIPSSDSGYNCVVIHLCLYEYFTTSFAFCRNVLVKTFI

SEQ ID NO: 3283 - protein, 50 aa, Homo sapiens
  MISC_FEATURE (11): Xaa equals any of the twenty naturally occurring L-amino acids
  MISC_FEATURE (16): Xaa equals any of the twenty naturally occurring L-amino acids
NRTCRWGSRPXCYLKXKRLCVQMNDKLSASPSAPLQAPAGGPVSKLMQSV

SEQ ID NO: 3284 - protein, 138 aa, Homo sapiens
  MISC_FEATURE (4): Xaa equals any of the twenty naturally occurring L-amino acids
  MISC_FEATURE (10): Xaa equals any of the twenty naturally occurring L-amino acids
  MISC_FEATURE (12): Xaa equals any of the twenty naturally occurring L-amino acids
  MISC_FEATURE (13): Xaa equals any of the twenty naturally occurring L-amino acids
  MISC_FEATURE (25): Xaa equals any of the twenty naturally occurring L-amino acids
  MISC_FEATURE (30): Xaa equals any of the twenty naturally occurring L-amino acids
  MISC_FEATURE (34): Xaa equals any of the twenty naturally occurring L-amino acids
  MISC_FEATURE (42): Xaa equals any of the twenty naturally occurring L-amino acids
  MISC_FEATURE (45): Xaa equals any of the twenty naturally occurring L-amino acids
  MISC_FEATURE (48): Xaa equals any of the twenty naturally occurring L-amino acids
  MISC_FEATURE (49): Xaa equals any of the twenty naturally occurring L-amino acids
  MISC_FEATURE (53): Xaa equals any of the twenty naturally occurring L-amino acids
  MISC_FEATURE (56): Xaa equals any of the twenty naturally occurring L-amino acids
  MISC_FEATURE (62): Xaa equals any of the twenty naturally occurring L-amino acids
  MISC_FEATURE (85): Xaa equals any of the twenty naturally occurring L-amino acids
  MISC_FEATURE (92): Xaa equals any of the twenty naturally occurring L-amino acids
  MISC_FEATURE (93): Xaa equals any of the twenty naturally occurring L-amino acids
  MISC_FEATURE (99): Xaa equals any of the twenty naturally occurring L-amino acids
  MISC_FEATURE (101): Xaa equals any of the twenty naturally occurring L-amino acids
  MISC_FEATURE (104): Xaa equals any of the twenty naturally occurring L-amino acids
  MISC_FEATURE (107): Xaa equals any of the twenty naturally occurring L-amino acids
  MISC_FEATURE (108): Xaa equals any of the twenty naturally occurring L-amino acids
  MISC_FEATURE (112): Xaa equals any of the twenty naturally occurring L-amino acids
  MISC_FEATURE (120): Xaa equals any of the twenty naturally occurring L-amino acids
  MISC_FEATURE (122): Xaa equals any of the twenty naturally occurring L-amino acids
  MISC_FEATURE (131): Xaa equals any of the twenty naturally occurring L-amino acids
  MISC_FEATURE (132): Xaa equals any of the twenty naturally occurring L-amino acids
KASXKLLYFXGXXILNFLIKKLITXNIGWXLASXSWGSPHSXFCXPHXXPLPXLRXSTRHDXKWDQQRAPTSGVPISHQASLTQXPELFVRXXRPSFSXLXGMXTVXXGLGXGIFHWKEXQXVPLITQTQXXTVMPYK

SEQ ID NO: 3285 - protein, 84 aa, Homo sapiens
  MISC_FEATURE (21): Xaa equals any of the twenty naturally occurring L-amino acids
  MISC_FEATURE (52): Xaa equals any of the twenty naturally occurring L-amino acids
FGFPVSFLVMPCLGFCGFGWXEGHLPECNLLALRRPCGPGLCERVDSGGRAXPARVAYMSLAVEALLQPAPLPCLIDAPFDLFK

SEQ ID NO: 3286 - protein, 111 aa, Homo sapiens
  MISC_FEATURE (1): Xaa equals any of the twenty naturally occurring L-amino acids
  MISC_FEATURE (34): Xaa equals any of the twenty naturally occurring L-amino acids
  MISC_FEATURE (51): Xaa equals any of the twenty naturally occurring L-amino acids
  MISC_FEATURE (107): Xaa equals any of the twenty naturally occurring L-amino acids
XQSRLTDAKRINWRTVLSGGSLYIEIPGGALPEXSKDSFAVLLEFAEEQLXADHVFICFHKNREDRAALLRTFSFLGFEIVRPGHPLVPKRPDACFMAYTFERESSXEEEE

SEQ ID NO: 3287 - protein, 160 aa, Homo sapiens
  MISC_FEATURE (4): Xaa equals any of the twenty naturally occurring L-amino acids
  MISC_FEATURE (5): Xaa equals any of the twenty naturally occurring L-amino acids
  MISC_FEATURE (25): Xaa equals any of the twenty naturally occurring L-amino acids
  MISC_FEATURE (35): Xaa equals any of the twenty naturally occurring L-amino acids
  MISC_FEATURE (68): Xaa equals any of the twenty naturally occurring L-amino acids
  MISC_FEATURE (73): Xaa equals any of the twenty naturally occurring L-amino acids
  MISC_FEATURE (76): Xaa equals any of the twenty naturally occurring L-amino acids
  MISC_FEATURE (99): Xaa equals any of the twenty naturally occurring L-amino acids
  MISC_FEATURE (108): Xaa equals any of the twenty naturally occurring L-amino acids
PFSXXSHALQVPVRNSRVDPRVLAXMVRVRTKGVXKAVRVIIEKYYTRLGNDFHTNKRVCEEIAIIPXKKLRXKIXRYVTHLMKRIQRGPVRGISIKLXEEERERRDXYVPEVSALDQEIIEVDPDTKEMLKLLDFGSLSNLQVTQPTVGMNFKTPRGPV

SEQ ID NO: 3288 - protein, 142 aa, Homo sapiens
  MISC_FEATURE (32): Xaa equals any of the twenty naturally occurring L-amino acids
  MISC_FEATURE (34): Xaa equals any of the twenty naturally occurring L-amino acids
  MISC_FEATURE (42): Xaa equals any of the twenty naturally occurring L-amino acids
  MISC_FEATURE (45): Xaa equals any of the twenty naturally occurring L-amino acids
  MISC_FEATURE (52): Xaa equals any of the twenty naturally occurring L-amino acids
  MISC_FEATURE (60): Xaa equals any of the twenty naturally occurring L-amino acids
  MISC_FEATURE (61): Xaa equals any of the twenty naturally occurring L-amino acids
  MISC_FEATURE (65): Xaa equals any of the twenty naturally occurring L-amino acids
  MISC_FEATURE (67): Xaa equals any of the twenty naturally occurring L-amino acids
  MISC_FEATURE (72): Xaa equals any of the twenty naturally occurring L-amino acids
  MISC_FEATURE (81): Xaa equals any of the twenty naturally occurring L-amino acids
  MISC_FEATURE (93): Xaa equals any of the twenty naturally occurring L-amino acids
  MISC_FEATURE (119): Xaa equals any of the twenty naturally occurring L-amino acids
  MISC_FEATURE (126): Xaa equals any of the twenty naturally occurring L-amino acids
  MISC_FEATURE (128): Xaa equals any of the twenty naturally occurring L-amino acids
  MISC_FEATURE (129): Xaa equals any of the twenty naturally occurring L-amino acids
  MISC_FEATURE (130): Xaa equals any of the twenty naturally occurring L-amino acids
  MISC_FEATURE (131): Xaa equals any of the twenty naturally occurring L-amino acids
  MISC_FEATURE (132): Xaa equals any of the twenty naturally occurring L-amino acids
  MISC_FEATURE (133): Xaa equals any of the twenty naturally occurring L-amino acids
  MISC_FEATURE (134): Xaa equals any of the twenty naturally occurring L-amino acids
  MISC_FEATURE (135): Xaa equals any of the twenty naturally occurring L-amino acids
LSFLFSERFKASTTLFPPSLLNLICTKSFALXGXVETALSLXTSXRECEPPXQVPVQGPXXLHLXRXTGRRXCARGLTLPXPSLEAPTDITEXPSSIPLRPISLCAPPHQGFSRSPGLXINKHCYXKXXXXXXXXKFPAVII

SEQ ID NO: 3289 - protein, 118 aa, Homo sapiens
GSPSSPSVRRASAKASTDHTKMPSQMEHAMETMMFTFHKFAGDKGYLTKEDLRVLMEKEFPGFLENQKDPLAVDKIMKDLDQCRDGKVGFQSFFSLIAGLTIACNDYFVVHMKQKGKK

SEQ ID NO: 3290 - protein, 139 aa, Homo sapiens
  MISC_FEATURE (7): Xaa equals any of the twenty naturally occurring L-amino acids
  MISC_FEATURE (18): Xaa equals any of the twenty naturally occurring L-amino acids
  MISC_FEATURE (28): Xaa equals any of the twenty naturally occurring L-amino acids
  MISC_FEATURE (36): Xaa equals any of the twenty naturally occurring L-amino acids
  MISC_FEATURE (50): Xaa equals any of the twenty naturally occurring L-amino acids
  MISC_FEATURE (56): Xaa equals any of the twenty naturally occurring L-amino acids
  MISC_FEATURE (57): Xaa equals any of the twenty naturally occurring L-amino acids
  MISC_FEATURE (68): Xaa equals any of the twenty naturally occurring L-amino acids
  MISC_FEATURE (101): Xaa equals any of the twenty naturally occurring L-amino acids
  MISC_FEATURE (116): Xaa equals any of the twenty naturally occurring L-amino acids
  MISC_FEATURE (134): Xaa equals any of the twenty naturally occurring L-amino acids
  MISC_FEATURE (135): Xaa equals any of the twenty naturally occurring L-amino acids
LLQVALXYGQMNEPPGAXARVALTGLTXAEYFRDQXGQDVLLFIDNIFRXTQAGSXXSALLGRIPSAXGYQPTLATDMGTMQERITTTKKGSITSVQAIYXPADDLTDPAPATTFXHLDATTVLSRPLLSWASXXLGIL

SEQ ID NO: 3291 - protein, 231 aa, Homo sapiens
  MISC_FEATURE (204): Xaa equals any of the twenty naturally occurring L-amino acids
PTRPRIVLQIDNARLAADDFRVKYETELAMRQSVENDIHGLRKVIDDTNITRLQLETEIEALKEELLFMKKNHEEEVKGLQAQIASSGLTVEVDAPKSQDLAKIMADIRAQYDELARKNREELDKYWSQQIEESTTVVTTQSAEVGAAETTLTELRRTVQSLEIDLDSMRNLKASLENSLREVEARYALQMEQLNGILLHLESXLHRPGQRDSARPRSMRPCLTSRSSWKA

SEQ ID NO: 3292 - protein, 220 aa, Homo sapiens
  MISC_FEATURE (72): Xaa equals any of the twenty naturally occurring L-amino acids
  MISC_FEATURE (171): Xaa equals any of the twenty naturally occurring L-amino acids
  MISC_FEATURE (203): Xaa equals any of the twenty naturally occurring L-amino acids
ASAAAAGGMASTASEIIAFMVSISGWVLVSSTLPTDYWKVSTIDGTVITTATYWANLWKACVTDSTGVSNCXDFPSMLALDGYIQACRGLMIAAVSLGFFGSIFALFGMKCTKVGGSDKAKAKIACLAGIVFILSGLCSMTGCSLYANKITTEFFDPLFVEQKYELGAALXIGWAGASLCIIGGGIFCFSISDNNQTPRYTYXGATSVMLLGQRIMVEKI

SEQ ID NO: 3293 - protein, 55 aa, Homo sapiens
LAPHCSAEAGSPAMAVLDRGTSTTTVFNFPVSIPVHSTNSALSYLQSPITTSPSC

SEQ ID NO: 3294 - protein, 76 aa, Homo sapiens
  MISC_FEATURE (25): Xaa equals any of the twenty naturally occurring L-amino acids
  MISC_FEATURE (29): Xaa equals any of the twenty naturally occurring L-amino acids
  MISC_FEATURE (45): Xaa equals any of the twenty naturally occurring L-amino acids
  MISC_FEATURE (56): Xaa equals any of the twenty naturally occurring L-amino acids
IKISLPTLKYLYSLSQFLEMRQWSXYYTXTYSLWLFLYSSEKNIXPKFLDIFLLMXKNFWIDSNLVIHDTEMPYFV

SEQ ID NO: 3295 - protein, 146 aa, Homo sapiens
  MISC_FEATURE (2): Xaa equals any of the twenty naturally occurring L-amino acids
  MISC_FEATURE (8): Xaa equals any of the twenty naturally occurring L-amino acids
  MISC_FEATURE (12): Xaa equals any of the twenty naturally occurring L-amino acids
  MISC_FEATURE (13): Xaa equals any of the twenty naturally occurring L-amino acids
  MISC_FEATURE (17): Xaa equals any of the twenty naturally occurring L-amino acids
GXRRGGEXTGGXXVTPXRYRSGIPGSTHASGDTTGKLGFEEFKYLWNNIKRWQAIYKQFDTDRSGTICSSELPGAFEAAGFHLNEHLYNMIIRRYSDESGNMDFDNFISCLVRLDAMFRAFKSLDKDGTGQIQVNIQEWLQLTMYS

SEQ ID NO: 3296 - protein, 114 aa, Homo sapiens
  MISC_FEATURE (52): Xaa equals any of the twenty naturally occurring L-amino acids
PLPPPTLAMFLTRSEYDRGVNTFSPEGRLFQVEYAIEAIKLGSTAIGIQTSXGVCLAVEKRITSPLMEPSSIEKIVEIDAHIGCAMSGLIADAKTLIDKARVETQNHWLPTMRQ

SEQ ID NO: 3297 - protein, 85 aa, Homo sapiens
  MISC_FEATURE (5): Xaa equals any of the twenty naturally occurring L-amino acids
  MISC_FEATURE (63): Xaa equals any of the twenty naturally occurring L-amino acids
  MISC_FEATURE (67): Xaa equals any of the twenty naturally occurring L-amino acids
VTTEXPGVAMGRRPARCYRYCKNKPYPKSRFCRGVPDAKIRIFDLGRKKAKVDEFPLCGHMVXDEYXQLSSEALEAAEFVPISTW

SEQ ID NO: 3298 - protein, 159 aa, Homo sapiens
  MISC_FEATURE (124): Xaa equals any of the twenty naturally occurring L-amino acids
  MISC_FEATURE (125): Xaa equals any of the twenty naturally occurring L-amino acids
  MISC_FEATURE (127): Xaa equals any of the twenty naturally occurring L-amino acids
  MISC_FEATURE (142): Xaa equals any of the twenty naturally occurring L-amino acids
  MISC_FEATURE (149): Xaa equals any of the twenty naturally occurring L-amino acids
  MISC_FEATURE (157): Xaa equals any of the twenty naturally occurring L-amino acids
EVKGLQAQIASSGLTVEVDAPKSQDLAKIMADIRAQYDELARKNREELDKYWSQQIEESTTVVTTQSAEVGAAETTLTELRRTVQSLEIDLDSMRNLKASLENSLREVEGPLRPTDGASSTGSXXTXESKLAQNPAEGQRQXQEYEALXTSRQVEVXWH

SEQ ID NO: 3299 - protein, 53 aa, Homo sapiens
  MISC_FEATURE (2): Xaa equals any of the twenty naturally occurring L-amino acids
  MISC_FEATURE (9): Xaa equals any of the twenty naturally occurring L-amino acids
  MISC_FEATURE (10): Xaa equals any of the twenty naturally occurring L-amino acids
  MISC_FEATURE (12): Xaa equals any of the twenty naturally occurring L-amino acids
  MISC_FEATURE (16): Xaa equals any of the twenty naturally occurring L-amino acids
  MISC_FEATURE (17): Xaa equals any of the twenty naturally occurring L-amino acids
  MISC_FEATURE (28): Xaa equals any of the twenty naturally occurring L-amino acids
  MISC_FEATURE (38): Xaa equals any of the twenty naturally occurring L-amino acids
  MISC_FEATURE (48): Xaa equals any of the twenty naturally occurring L-amino acids
  MISC_FEATURE (50): Xaa equals any of the twenty naturally occurring L-amino acids
  MISC_FEATURE (52): Xaa equals any of the twenty naturally occurring L-amino acids
LXTTSATRXXYXASGXXWTREMSTSVDXTNTTFLLMAXFIYLHFQEPXCXSXV

SEQ ID NO: 3300 - protein, 44 aa, Homo sapiens
KKCLFPYSLTFQGEHTVKKFPRCQYQESGIFPEQLLSCMLSTLV

SEQ ID NO: 3301 - protein, 49 aa, Homo sapiens
RFVCSTIKVLRDLSSDRSNPGRFLSTSNSSLYERTREIRPTSQSAFPRK

SEQ ID NO: 3302 - protein, 105 aa, Homo sapiens
VPTQLSVMASGNARIGKPAPDFKATAVVDGAFKEVKLSDYKGKYVVLFFYPLDFTFVCPTEIIAFSNRAEDFRKLGCEVLGVSVDSQFTHLAWINTPRKEGGLAP

SEQ ID NO: 3303 - protein, 148 aa, Homo sapiens
  MISC_FEATURE (92): Xaa equals any of the twenty naturally occurring L-amino acids
  MISC_FEATURE (110): Xaa equals any of the twenty naturally occurring L-amino acids
  MISC_FEATURE (120): Xaa equals any of the twenty naturally occurring L-amino acids
  MISC_FEATURE (122): Xaa equals any of the twenty naturally occurring L-amino acids
  MISC_FEATURE (129): Xaa equals any of the twenty naturally occurring L-amino acids
  MISC_FEATURE (141): Xaa equals any of the twenty naturally occurring L-amino acids
  MISC_FEATURE (147): Xaa equals any of the twenty naturally occurring L-amino acids
AWGRRRLGPGSSGGSARERVSLSATDCYIVHEIYNGENAQDQFEYELEQALEAQYKYIVIEPTRIGDETARWITVGNCLHKTAVLAGTAASXPVGACLRLFPLHFPCRWXAEPGLLTLYXIXWQVDLCXKYQVEYDAHKLXRLPFGXT

SEQ ID NO: 3304 - protein, 199 aa, Homo sapiens
  MISC_FEATURE (111): Xaa equals any of the twenty naturally occurring L-amino acids
  MISC_FEATURE (116): Xaa equals any of the twenty naturally occurring L-amino acids
  MISC_FEATURE (169): Xaa equals any of the twenty naturally occurring L-amino acids
  MISC_FEATURE (198): Xaa equals any of the twenty naturally occurring L-amino acids
AAAMSMLRLQKRLASSVLRCGKKKVWLDPNETNEIANANSRQQIRKLIKDGLIIRKPVTVHSRARCRKNTLARRKGRHMGIGKRKGTANARMPEKVTWMRRMRILRRLLRXYRESXKIDRHMYHSLYLKVKGNVFKNKRILMEHIHKLKQTRPARSFWLTRLRPASLRXRKHASAVKSASGQEGGDHQGLYSREEETXK

SEQ ID NO: 3305 - protein, 29 aa, Homo sapiens
  MISC_FEATURE (4): Xaa equals any of the twenty naturally occurring L-amino acids
IIAXTFLFKWWDNLNHLNQFVDHEKIYRM

SEQ ID NO: 3306 - protein, 172 aa, Homo sapiens
  MISC_FEATURE (18): Xaa equals any of the twenty naturally occurring L-amino acids
  MISC_FEATURE (21): Xaa equals any of the twenty naturally occurring L-amino acids
  MISC_FEATURE (24): Xaa equals any of the twenty naturally occurring L-amino acids
  MISC_FEATURE (38): Xaa equals any of the twenty naturally occurring L-amino acids
  MISC_FEATURE (55): Xaa equals any of the twenty naturally occurring L-amino acids
  MISC_FEATURE (62): Xaa equals any of the twenty naturally occurring L-amino acids
  MISC_FEATURE (153): Xaa equals any of the twenty naturally occurring L-amino acids
  MISC_FEATURE (164): Xaa equals any of the twenty naturally occurring L-amino acids
  MISC_FEATURE (165): Xaa equals any of the twenty naturally occurring L-amino acids
  MISC_FEATURE (168): Xaa equals any of the twenty naturally occurring L-amino acids
  MISC_FEATURE (169): Xaa equals any of the twenty naturally occurring L-amino acids
FGRRAGGWGGCAGLFFFXLTXGQXRSMSTPARRRLMRXFKRLQEDPPVGVSGAPXENNIMQXNAVIFGPEGTPFEDGTFKLVIEFSEEYPNKPPTVRFLSKMFHPNVYADGSICLDILQNRWSPTYDVSSILTSIQSLLDEPNPNSPANSQAXQVYQENKPEFXXKSXXIVE

SEQ ID NO: 3307 - protein, 133 aa, Homo sapiens
  MISC_FEATURE (123): Xaa equals any of the twenty naturally occurring L-amino acids
ARPVVPGPRVRALQLPYRCAQPGDQCQVAGWGTTAARRVKYNKGLTCSSITILSPKECEVFYPGVVTNNMICAGLDRGQDPCQSDSGGPLVCDETLQGILSWGVYPCGSAQHPAVYTQICKYXSWINKVIRSN

SEQ ID NO: 3308 - protein, 52 aa, Homo sapiens
NLCIICDFEMNTLNSTNFYLWYFSITKQVALGKEVLFCKRSFVTSDTLWLIF

SEQ ID NO: 3309 - protein, 109 aa, Homo sapiens
  MISC_FEATURE (3): Xaa equals any of the twenty naturally occurring L-amino acids
  MISC_FEATURE (12): Xaa equals any of the twenty naturally occurring L-amino acids
  MISC_FEATURE (17): Xaa equals any of the twenty naturally occurring L-amino acids
  MISC_FEATURE (19): Xaa equals any of the twenty naturally occurring L-amino acids
  MISC_FEATURE (20): Xaa equals any of the twenty naturally occurring L-amino acids
  MISC_FEATURE (35): Xaa equals any of the twenty naturally occurring L-amino acids
  MISC_FEATURE (36): Xaa equals any of the twenty naturally occurring L-amino acids
FRXNPSWSSTAXAAALXLXXSPGCRNSISSLSIPXXSRGGPVPNSPYSESYYARSLAVVLQRRDWENPGVTQLNRLAAHPPFASWRNSEEARTDRPSQQLRSLNGEWKL

SEQ ID NO: 3310 - protein, 30 aa, Homo sapiens
  MISC_FEATURE (2): Xaa equals any of the twenty naturally occurring L-amino acids
  MISC_FEATURE (16): Xaa equals any of the twenty naturally occurring L-amino acids
  MISC_FEATURE (17): Xaa equals any of the twenty naturally occurring L-amino acids
  MISC_FEATURE (18): Xaa equals any of the twenty naturally occurring L-amino acids
  MISC_FEATURE (30): Xaa equals any of the twenty naturally occurring L-amino acids
AXIFKSQRLTQLLEGXXXGPSAKRLHPWPX

SEQ ID NO: 3311 - protein, 74 aa, Homo sapiens
TCTVRTSTDLPQTENCFQYIHQVTEVGQKIATFLLFYGYYKCTRTLKETCLYNAILSKVCSPGNNQLDACYDPF

SEQ ID NO: 3312 - protein, 153 aa, Homo sapiens
RPSHSTSPSPISSIHQIWARAQLHSTPPRGSFSTCSKPLFQKSSMGPFYLGCQLISLRPEKDGAATGVDTTCTYHPDPVGPGLDIQQLYWELSQLTHGVTQLGFYVLDRDSLFINGYAPQNLSIRGEYQINFHIVNWNLSNPDPTFLEVHHPS

SEQ ID NO: 3313 - protein, 89 aa, Homo sapiens
  MISC_FEATURE (82): Xaa equals any of the twenty naturally occurring L-amino acids
AVIVKGPRGTLRRDFNHINVELSLLGKKKKRLRVDKWWGNRKELATVRTICSHVQNMIKGVTLGFRYKMRSVYAHFPINVGXQEKWVSC

SEQ ID NO: 3314 - protein, 206 aa, Homo sapiens
  MISC_FEATURE (204): Xaa equals any of the twenty naturally occurring L-amino acids
  MISC_FEATURE (206): Xaa equals any of the twenty naturally occurring L-amino acids
SNARISDEKRFVCMLVTEDNVFEAPTIVKVFKQPSKPEIVSKALFLETEQLKKLGDCISEDSYPDGNITWYRNGKVLHPLEGAVVIIFKKEMDPVTQLYTMTSTLEYKTTKADIQMPFTCSVTYYGPSGQKTIHSEQAVFDIYYPTEQVTIQVLPPKNAIKEGDNITLKCLGNGNPPPEEFLVYLPGQPQENSRSVNGNMPPAXTX

SEQ ID NO: 3315 - protein, 194 aa, Homo sapiens
  MISC_FEATURE (23): Xaa equals any of the twenty naturally occurring L-amino acids
  MISC_FEATURE (124): Xaa equals any of the twenty naturally occurring L-amino acids
  MISC_FEATURE (159): Xaa equals any of the twenty naturally occurring L-amino acids
  MISC_FEATURE (162): Xaa equals any of the twenty naturally occurring L-amino acids
  MISC_FEATURE (183): Xaa equals any of the twenty naturally occurring L-amino acids
  MISC_FEATURE (184): Xaa equals any of the twenty naturally occurring L-amino acids
VASQLQNRLRSALALVTGAGSGXGRAVSVRLAGEGATVAACDLDRAAAQETVRLLGGPGSKEGPPRGNHAAFQADVSEARAARCLLEQVQACFSRPPSVAVSCAGITQDEFLLHMSEDDWDKVXAVNLKGTFLVTQAAAQALVSNGCRGSIINISSIVXKVXNVGQTNYAASKAGVIGLTQTXXRELGRHGIRL

SEQ ID NO: 3316 - protein, 77 aa, Homo sapiens
NPECCLPVAMRTSYLLLFTLCLLLSEMASGGNFLTGLGHRSDHYNCVSSGGQCLYSACPIFTKIQGTCYRGKAKCCK

SEQ ID NO: 3317 - protein, 64 aa, Homo sapiens
  MISC_FEATURE (52): Xaa equals any of the twenty naturally occurring L-amino acids
  MISC_FEATURE (55): Xaa equals any of the twenty naturally occurring L-amino acids
AFLFHFGVDASETDSAAATYHNVFVARSTRTWMPRIHKKKTDATVDEAISRXSKXFPRFLCFNY

SEQ ID NO: 3318 - protein, 194 aa, Homo sapiens
  MISC_FEATURE (120): Xaa equals any of the twenty naturally occurring L-amino acids
  MISC_FEATURE (124): Xaa equals any of the twenty naturally occurring L-amino acids
  MISC_FEATURE (127): Xaa equals any of the twenty naturally occurring L-amino acids
  MISC_FEATURE (150): Xaa equals any of the twenty naturally occurring L-amino acids
  MISC_FEATURE (164): Xaa equals any of the twenty naturally occurring L-amino acids
  MISC_FEATURE (184): Xaa equals any of the twenty naturally occurring L-amino acids
  MISC_FEATURE (190): Xaa equals any of the twenty naturally occurring L-amino acids
  MISC_FEATURE (194): Xaa equals any of the twenty naturally occurring L-amino acids
GLIELKDCQPDKVYLGGLDVCGEDGQFTYCWHDDIMQAVFHIATLMPTKDVDKHRCDKKRHLGNDFVSIVYNDSGEDFKLGTIKGQFNFVHVIVTPLDYECNLGVLAVQERHWRALWTPXPWAXNRXLDRQPALSWPRPDGPLHAKYWAXQGALISPFPTPTDXLNPFQVELAPGFRHIKAGFXPAESFXGKPX

SEQ ID NO: 3319 - protein, 22 aa, Homo sapiens
VQDYLNSSLPNSLTFRLAQYFH

SEQ ID NO: 3320 - protein, 62 aa, Homo sapiens
  MISC_FEATURE (8): Xaa equals any of the twenty naturally occurring L-amino acids
  MISC_FEATURE (12): Xaa equals any of the twenty naturally occurring L-amino acids
  MISC_FEATURE (24): Xaa equals any of the twenty naturally occurring L-amino acids
  MISC_FEATURE (41): Xaa equals any of the twenty naturally occurring L-amino acids
  MISC_FEATURE (46): Xaa equals any of the twenty naturally occurring L-amino acids
  MISC_FEATURE (51): Xaa equals any of the twenty naturally occurring L-amino acids
  MISC_FEATURE (61): Xaa equals any of the twenty naturally occurring L-amino acids
  MISC_FEATURE (62): Xaa equals any of the twenty naturally occurring L-amino acids
KKGNCTQXVGGXRRILSPVVHEIXPALVFQKISTSPCTKVXPGVFXKCKPXEETFKRDHLXX

SEQ ID NO: 3321 - protein, 82 aa, Homo sapiens
KERKQQHDPDMTDVGDPQPADTVGWKVGREGPVEVELFESDTAAVEAVVGEAQVTLRTLHKNIREKNQNPLRKMFFMYERLK

SEQ ID NO: 3322 - protein, 190 aa, Homo sapiens
  MISC_FEATURE (167): Xaa equals any of the twenty naturally occurring L-amino acids
  MISC_FEATURE (181): Xaa equals any of the twenty naturally occurring L-amino acids
ERGGKMAVQISKKRKFVADGIFKAELNEFLTRELAEDGYSGVEVRVTPTRTEIIILATRTQNVLGEKGRRIRELTAVVQKRFGFPEGSVELYAEKVATRGLCAIAQAESLRYKLLGGLAVRRACYGVLRFIMESGAKGCEVVVSGKLPGQRAKSMKFVDGLMIHSGXPVNYYVDTAVRHVXLKQGVLASR

SEQ ID NO: 3323 - protein, 178 aa, Homo sapiens
  MISC_FEATURE (159): Xaa equals any of the twenty naturally occurring L-amino acids
  MISC_FEATURE (161): Xaa equals any of the twenty naturally occurring L-amino acids
  MISC_FEATURE (167): Xaa equals any of the twenty naturally occurring L-amino acids
  MISC_FEATURE (172): Xaa equals any of the twenty naturally occurring L-amino acids
  MISC_FEATURE (175): Xaa equals any of the twenty naturally occurring L-amino acids
LNMGKGDPKKPRGKMSSYAFFVQTCREEHKKKHPDASVNFSEFSKKCSERWKTMSAKEKGKFEDMAKADKARYEREMKTYIPPKGETKKKFKDPNAPKRPPSAFFLFCSEYRPKIKGEHPGLSIGDVAKKLGEMWNNTAADDKQPYEKKAAKLKEKYEXDXAAYRAXGKPEXQKXEVA

SEQ ID NO: 3324 - protein, 63 aa, Homo sapiens
PTFSRAVATMFSRAGVAGLSAWTLQPQWIQVRNMATLKDITRRLKSIKNIQKITKSMKMVAAA

SEQ ID NO: 3325 - protein, 119 aa, Homo sapiens
  MISC_FEATURE (1): Xaa equals any of the twenty naturally occurring L-amino acids
  MISC_FEATURE (2): Xaa equals any of the twenty naturally occurring L-amino acids
  MISC_FEATURE (17): Xaa equals any of the twenty naturally occurring L-amino acids
  MISC_FEATURE (28): Xaa equals any of the twenty naturally occurring L-amino acids
  MISC_FEATURE (37): Xaa equals any of the twenty naturally occurring L-amino acids
  MISC_FEATURE (40): Xaa equals any of the twenty naturally occurring L-amino acids
  MISC_FEATURE (49): Xaa equals any of the twenty naturally occurring L-amino acids
  MISC_FEATURE (56): Xaa equals any of the twenty naturally occurring L-amino acids
  MISC_FEATURE (60): Xaa equals any of the twenty naturally occurring L-amino acids
  MISC_FEATURE (65): Xaa equals any of the twenty naturally occurring L-amino acids
  MISC_FEATURE (73): Xaa equals any of the twenty naturally occurring L-amino acids
  MISC_FEATURE (90): Xaa equals any of the twenty naturally occurring L-amino acids
  MISC_FEATURE (102): Xaa equals any of the twenty naturally occurring L-amino acids
  MISC_FEATURE (103): Xaa equals any of the twenty naturally occurring L-amino acids
  MISC_FEATURE (110): Xaa equals any of the twenty naturally occurring L-amino acids
  MISC_FEATURE (112): Xaa equals any of the twenty naturally occurring L-amino acids
  MISC_FEATURE (114): Xaa equals any of the twenty naturally occurring L-amino acids
  MISC_FEATURE (117): Xaa equals any of the twenty naturally occurring L-amino acids
XXAQKCLGSSPVPLGTXSEHSGFPTQLXLSLFFPWIXQAXLGALTRNFXKKPLITXTKHXQGYTXACTGFLPXRRLKPVPDWPGHTALAXAQMSAPPLELGXXNPTQKPXLXLXQIXLP

SEQ ID NO: 3326 - protein, 131 aa, Homo sapiens
EGSLRTIPVTRSPLVTMNHIVQTFSPVNSGQPPNYEMLKEEQEVAMLGAPHNPAPPTSTVIHIRSETSVPDHVVWSLFNTLFMNTCCLGFIAFAYSVKSRDRKMVGDVTGAQAYASTAKCLNIWALILASS

SEQ ID NO: 3327 - protein, 105 aa, Homo sapiens
  MISC_FEATURE (31): Xaa equals any of the twenty naturally occurring L-amino acids
  MISC_FEATURE (61): Xaa equals any of the twenty naturally occurring L-amino acids
  MISC_FEATURE (62): Xaa equals any of the twenty naturally occurring L-amino acids
  MISC_FEATURE (63): Xaa equals any of the twenty naturally occurring L-amino acids
  MISC_FEATURE (83): Xaa equals any of the twenty naturally occurring L-amino acids
  MISC_FEATURE (92): Xaa equals any of the twenty naturally occurring L-amino acids
  MISC_FEATURE (97): Xaa equals any of the twenty naturally occurring L-amino acids
VACMSGDGPGSWGLEGRGPSALGSQGALPAXQASPGKHSPETQLGQLGGCVHPSPAVLWLXXXPWSLLARFESPSLWALFWPXCTWPFLTRXPLNWXSTTILDFR

SEQ ID NO: 3328 - protein, 194 aa, Homo sapiens
  MISC_FEATURE (7): Xaa equals any of the twenty naturally occurring L-amino acids
  MISC_FEATURE (10): Xaa equals any of the twenty naturally occurring L-amino acids
  MISC_FEATURE (14): Xaa equals any of the twenty naturally occurring L-amino acids
  MISC_FEATURE (31): Xaa equals any of the twenty naturally occurring L-amino acids
  MISC_FEATURE (127): Xaa equals any of the twenty naturally occurring L-amino acids
  MISC_FEATURE (177): Xaa equals any of the twenty naturally occurring L-amino acids
  MISC_FEATURE (181): Xaa equals any of the twenty naturally occurring L-amino acids
VIKGYLXNHXGKLXRLQVPVRNSRVDPRVRXCETEVNITFCEGSCPGASKYSAEAQAMQHQCTCCQERRVHEETVPLHCPNGSAILHTYTHVDECGCTPFCVPAPMAPPHTRGFRPGGHCCLRTSAXSHALSPGARMCIADHENLGLLCGAPACVWTPASCSVATRVKRPEVRAETXERIXLLNWHLLPLDDLK

SEQ ID NO: 3329 - protein, 59 aa, Homo sapiens
  MISC_FEATURE (26): Xaa equals any of the twenty naturally occurring L-amino acids
  MISC_FEATURE (32): Xaa equals any of the twenty naturally occurring L-amino acids
  MISC_FEATURE (49): Xaa equals any of the twenty naturally occurring L-amino acids
ESKLTWLAWRWGRHPSAPWCCPLSLXSHTMFXLSTVQRSLYNTEKQYHXMRLTPCIIIH

SEQ ID NO: 3330 - protein, 42 aa, Homo sapiens
  MISC_FEATURE (4): Xaa equals any of the twenty naturally occurring L-amino acids
  MISC_FEATURE (19): Xaa equals any of the twenty naturally occurring L-amino acids
  MISC_FEATURE (40): Xaa equals any of the twenty naturally occurring L-amino acids
  MISC_FEATURE (42): Xaa equals any of the twenty naturally occurring L-amino acids
ASSXKAPVRNFRIDPRVPXLNQDWKLLDTWKNNGRNRKKXKX

SEQ ID NO: 3331 - protein, 150 aa, Homo sapiens
  MISC_FEATURE (2): Xaa equals any of the twenty naturally occurring L-amino acids
  MISC_FEATURE (3): Xaa equals any of the twenty naturally occurring L-amino acids
  MISC_FEATURE (9): Xaa equals any of the twenty naturally occurring L-amino acids
  MISC_FEATURE (13): Xaa equals any of the twenty naturally occurring L-amino acids
  MISC_FEATURE (71): Xaa equals any of the twenty naturally occurring L-amino acids
  MISC_FEATURE (80): Xaa equals any of the twenty naturally occurring L-amino acids
  MISC_FEATURE (89): Xaa equals any of the twenty naturally occurring L-amino acids
  MISC_FEATURE (99): Xaa equals any of the twenty naturally occurring L-amino acids
  MISC_FEATURE (123): Xaa equals any of the twenty naturally occurring L-amino acids
  MISC_FEATURE (141): Xaa equals any of the twenty naturally occurring L-amino acids
TXXILAKRXELKXAAATGATPIAGRFTPGTFTNQIQAAFREPRLLVVTDPRADHQPLTEASYVNLPTIALXNTDSPLRYXDIAIPCNNXGAHSVGLMCXCCSGSLRMRGTISREHPWEACLIXTSTEILKRLKKKNRLLLXSSDQGGISG

SEQ ID NO: 3332 - protein, 235 aa, Homo sapiens
  MISC_FEATURE (1): Xaa equals any of the twenty naturally occurring L-amino acids
  MISC_FEATURE (5): Xaa equals any of the twenty naturally occurring L-amino acids
  MISC_FEATURE (6): Xaa equals any of the twenty naturally occurring L-amino acids
  MISC_FEATURE (45): Xaa equals any of the twenty naturally occurring L-amino acids
  MISC_FEATURE (79): Xaa equals any of the twenty naturally occurring L-amino acids
  MISC_FEATURE (157): Xaa equals any of the twenty naturally occurring L-amino acids
  MISC_FEATURE (174): Xaa equals any of the twenty naturally occurring L-amino acids
  MISC_FEATURE (193): Xaa equals any of the twenty naturally occurring L-amino acids
  MISC_FEATURE (195): Xaa equals any of the twenty naturally occurring L-amino acids
  MISC_FEATURE (200): Xaa equals any of the twenty naturally occurring L-amino acids
  MISC_FEATURE (223): Xaa equals any of the twenty naturally occurring L-amino acids
  MISC_FEATURE (230): Xaa equals any of the twenty naturally occurring L-amino acids
XYIIXXKRTCEKLLLAARAIVAIENPADVRGISSRNTGQRAVLKXAAATGATPIAGRFTPGTFTNQIQAAFREPRLLVXTDPRADHQPLTEASYVNLPTIALCNTDSPLRYVDIAIPCNNKGAHSVGLMWWMLAREVLRMRGTISREHPWEVMPDLXFYRDPEEIEKEEQAAAXKAVTKEEFQGEWTAPAPEXTXTHLRXQLAESVQVPSGLFTIPTEAGALXCTEAGCXSLVSH

SEQ ID NO: 3333 - protein, 60 aa, Homo sapiens
  MISC_FEATURE (19): Xaa equals any of the twenty naturally occurring L-amino acids
  MISC_FEATURE (56): Xaa equals any of the twenty naturally occurring L-amino acids
  MISC_FEATURE (59): Xaa equals any of the twenty naturally occurring L-amino acids
  MISC_FEATURE (60): Xaa equals any of the twenty naturally occurring L-amino acids
SKHVVFWGHMHQVSILETXKLSCLCTVCKFILFKNHFYFDFDLLNALKAKKKKKGXAVXX

SEQ ID NO: 3334 - protein, 157 aa, Homo sapiens
  MISC_FEATURE (12): Xaa equals any of the twenty naturally occurring L-amino acids
  MISC_FEATURE (18): Xaa equals any of the twenty naturally occurring L-amino acids
  MISC_FEATURE (24): Xaa equals any of the twenty naturally occurring L-amino acids
  MISC_FEATURE (39): Xaa equals any of the twenty naturally occurring L-amino acids
  MISC_FEATURE (42): Xaa equals any of the twenty naturally occurring L-amino acids
  MISC_FEATURE (112): Xaa equals any of the twenty naturally occurring L-amino acids
  MISC_FEATURE (125): Xaa equals any of the twenty naturally occurring L-amino acids
  MISC_FEATURE (126): Xaa equals any of the twenty naturally occurring L-amino acids
  MISC_FEATURE (130): Xaa equals any of the twenty naturally occurring L-amino acids
DNVGFNVKNVSXKDVRRXNVAGDXKNDPPMEAAGFTAQXIIXNHPGQISAGYAPVLDCHTAHIACKFAELKEKIDRRSGKKLEDGPKFLKSGDAAIGDMVPGKPMCVESFSXYPPLGRFAVRDMXXTVAXGGIKATGQEGCWNLQGHQVCQKAQKAK

SEQ ID NO: 3335 - protein, 173 aa, Homo sapiens
  MISC_FEATURE (11): Xaa equals any of the twenty naturally occurring L-amino acids
  MISC_FEATURE (61): Xaa equals any of the twenty naturally occurring L-amino acids
  MISC_FEATURE (124): Xaa equals any of the twenty naturally occurring L-amino acids
  MISC_FEATURE (126): Xaa equals any of the twenty naturally occurring L-amino acids
  MISC_FEATURE (133): Xaa equals any of the twenty naturally occurring L-amino acids
  MISC_FEATURE (136): Xaa equals any of the twenty naturally occurring L-amino acids
  MISC_FEATURE (137): Xaa equals any of the twenty naturally occurring L-amino acids
  MISC_FEATURE (145): Xaa equals any of the twenty naturally occurring L-amino acids
  MISC_FEATURE (163): Xaa equals any of the twenty naturally occurring L-amino acids
DLVLRLRGGMXIFVKTLTGKTITLEVEPSDTIENVKAKIQDKEGIPPDQQRLIFAGKQLEXGRTLSDYNIQKESTLHLVLRLRGGMQIFVKTLTGKTITLEVEPSDTIENVKAKIQDKEGIPPXQXRLIFAGXQLXXGRTLSDYXIQKESTLAPGPAPEGWLXFFSHGIRSAK

SEQ ID NO: 3336 - protein, 132 aa, Homo sapiens
  MISC_FEATURE (20): Xaa equals any of the twenty naturally occurring L-amino acids
  MISC_FEATURE (110): Xaa equals any of the twenty naturally occurring L-amino acids
  MISC_FEATURE (115): Xaa equals any of the twenty naturally occurring L-amino acids
  MISC_FEATURE (122): Xaa equals any of the twenty naturally occurring L-amino acids
  MISC_FEATURE (132): Xaa equals any of the twenty naturally occurring L-amino acids
DAWVPPTPWSISQFEARCAXLRMLLADQGQSWKEEVVTRGDVAGGLTQSLLPIRQLPKFQDGDLTLYQVQYHPASPGPTLGLYGKDQQEAALVDMVNDGVEDLRCNTFPXLHQLXSGKDDYXKGTGRATEAX

SEQ ID NO: 3337 - protein, 47 aa, Homo sapiens
RARAGNARKSASARRSRELERSVKVGSGGPVLRWNAHLWAQCPIASI

SEQ ID NO: 3338 - protein, 204 aa, Homo sapiens
  MISC_FEATURE (176): Xaa equals any of the twenty naturally occurring L-amino acids
  MISC_FEATURE (204): Xaa equals any of the twenty naturally occurring L-amino acids
PFEPLASGILLLLWLIAPSRACTCVPPHPQTAFCNSDLVIRAKFVGTPEVNQTTLYQRYEIKMTKMYKGFQALGDAADIRFVYTPAMESVCGYFHRSHNRSEEFLIAGKLQDGLLHITTCSFVAPWNSLSLAQRRGFTKTYTVGCEECTVFPCLSIPCKLQSGTHCLWTDQLLQGXEKGFQSRHLACLPREQAGHLAVPAVQIX

SEQ ID NO: 3339 - protein, 49 aa, Homo sapiens
  MISC_FEATURE (6): Xaa equals any of the twenty naturally occurring L-amino acids
  MISC_FEATURE (7): Xaa equals any of the twenty naturally occurring L-amino acids
LLVTSXXDPPMEAAGFTAQVIILNHPGQISAGYAPVLDCHTAHIACKFA

SEQ ID NO: 3340 - protein, 123 aa, Homo sapiens
  MISC_FEATURE (9): Xaa equals any of the twenty naturally occurring L-amino acids
  MISC_FEATURE (77): Xaa equals any of the twenty naturally occurring L-amino acids
  MISC_FEATURE (98): Xaa equals any of the twenty naturally occurring L-amino acids
  MISC_FEATURE (101): Xaa equals any of the twenty naturally occurring L-amino acids
  MISC_FEATURE (102): Xaa equals any of the twenty naturally occurring L-amino acids
  MISC_FEATURE (104): Xaa equals any of the twenty naturally occurring L-amino acids
  MISC_FEATURE (106): Xaa equals any of the twenty naturally occurring L-amino acids
  MISC_FEATURE (109): Xaa equals any of the twenty naturally occurring L-amino acids
  MISC_FEATURE (114): Xaa equals any of the twenty naturally occurring L-amino acids
  MISC_FEATURE (115): Xaa equals any of the twenty naturally occurring L-amino acids
DFSAADAAXMRYVASYLLAALGGNSSPSAKDIKKILDSVGIEADDDRLNKVISELNGKNIEDVIAQGIGKLASVPAXGAVARLCCPRLCSPCCWFCPXAGXXKXDXKEXGVLRXXMMTGNWAF

SEQ ID NO: 3341 - protein, 143 aa, Homo sapiens
  MISC_FEATURE (101): Xaa equals any of the twenty naturally occurring L-amino acids
  MISC_FEATURE (109): Xaa equals any of the twenty naturally occurring L-amino acids
  MISC_FEATURE (113): Xaa equals any of the twenty naturally occurring L-amino acids
  MISC_FEATURE (114): Xaa equals any of the twenty naturally occurring L-amino acids
  MISC_FEATURE (117): Xaa equals any of the twenty naturally occurring L-amino acids
RLQVRIDGLLLFPPPPVSPVCFLLSGLRNLPPPTPPRGLQELCLLPVQVEEGSCRPGQKASLIIFSAVEIGDKGCIPPLVQRGFHPQPFFSWELVAFEGVXGQKWEGKXPSGXXSTXWTLVLFSELGRDGRLNLLGRIPEASS

SEQ ID NO: 3342 - protein, 90 aa, Homo sapiens
  MISC_FEATURE (87): Xaa equals any of the twenty naturally occurring L-amino acids
  MISC_FEATURE (88): Xaa equals any of the twenty naturally occurring L-amino acids
  MISC_FEATURE (89): Xaa equals any of the twenty naturally occurring L-amino acids
LSIRPRQRLATLISNMPGPTPSGTNVGSSGRSPSKAVAARAAGSTVRQRKNASCGTRSAGRTTSAGTGGMWRFYTRRFTWAQSWPWXXXG

SEQ ID NO: 3343 - protein, 79 aa, Homo sapiens
  MISC_FEATURE (43): Xaa equals any of the twenty naturally occurring L-amino acids
  MISC_FEATURE (44): Xaa equals any of the twenty naturally occurring L-amino acids
  MISC_FEATURE (77): Xaa equals any of the twenty naturally occurring L-amino acids
EKKPFKNTENIKNSHLKKSAFLTEVSQKENYAGAKFSDPPSPXXLPKPPSHWMGSTVENSNQNRELMAVHLKTLLKXQT

SEQ ID NO: 3344 - protein, 139 aa, Homo sapiens
  MISC_FEATURE (77): Xaa equals any of the twenty naturally occurring L-amino acids
  MISC_FEATURE (79): Xaa equals any of the twenty naturally occurring L-amino acids
  MISC_FEATURE (88): Xaa equals any of the twenty naturally occurring L-amino acids
  MISC_FEATURE (103): Xaa equals any of the twenty naturally occurring L-amino acids
  MISC_FEATURE (109): Xaa equals any of the twenty naturally occurring L-amino acids
  MISC_FEATURE (136): Xaa equals any of the twenty naturally occurring L-amino acids
TWADKKGKIVDAVIQEHQPSVLLELGAYCGYSAVRMARLLSPGARLITIEINPDCAAITQRMVDFAGVKDKVTLVVXAXQDIIPQLKXKYDVDTLDMVFLDHXKDRYLXDTLLLEECGLLRKGTVLLADNVICQVXQTS

SEQ ID NO: 3345 - protein, 107 aa, Homo sapiens
  MISC_FEATURE (1): Xaa equals any of the twenty naturally occurring L-amino acids
  MISC_FEATURE (2): Xaa equals any of the twenty naturally occurring L-amino acids
  MISC_FEATURE (5): Xaa equals any of the twenty naturally occurring L-amino acids
  MISC_FEATURE (6): Xaa equals any of the twenty naturally occurring L-amino acids
  MISC_FEATURE (22): Xaa equals any of the twenty naturally occurring L-amino acids
  MISC_FEATURE (26): Xaa equals any of the twenty naturally occurring L-amino acids
  MISC_FEATURE (46): Xaa equals any of the twenty naturally occurring L-amino acids
XXATXXRPPGSTHASGGKHQPXKVTXYKKGKDSLYAQGKRRYDRKXSGYGGQTKPIFRKKAKTTKKIVLRLECVEPNCRSKRMLAIKRCKHFELGGDKKRKGQVIQF

SEQ ID NO: 3346 - protein, 80 aa, Homo sapiens
  MISC_FEATURE (56): Xaa equals any of the twenty naturally occurring L-amino acids
  MISC_FEATURE (62): Xaa equals any of the twenty naturally occurring L-amino acids
  MISC_FEATURE (68): Xaa equals any of the twenty naturally occurring L-amino acids
  MISC_FEATURE (71): Xaa equals any of the twenty naturally occurring L-amino acids
  MISC_FEATURE (72): Xaa equals any of the twenty naturally occurring L-amino acids
  MISC_FEATURE (73): Xaa equals any of the twenty naturally occurring L-amino acids
  MISC_FEATURE (75): Xaa equals any of the twenty naturally occurring L-amino acids
  MISC_FEATURE (76): Xaa equals any of the twenty naturally occurring L-amino acids
DISAFLQESDVVIVYYSFNIHLLSMLTVVIYDWLVHSRFLFCVSYLYFLIFLQRLXITCIIXIRALNXEKXXXKXXGGRS

SEQ ID NO: 3347 - protein, 29 aa, Homo sapiens
  MISC_FEATURE (27): Xaa equals any of the twenty naturally occurring L-amino acids
  MISC_FEATURE (28): Xaa equals any of the twenty naturally occurring L-amino acids
KKKKKGGRSRGSKLTYACMRRHKLFYXXT

SEQ ID NO: 3348 - protein, 169 aa, Homo sapiens
  MISC_FEATURE (7): Xaa equals any of the twenty naturally occurring L-amino acids
  MISC_FEATURE (24): Xaa equals any of the twenty naturally occurring L-amino acids
  MISC_FEATURE (127): Xaa equals any of the twenty naturally occurring L-amino acids
  MISC_FEATURE (148): Xaa equals any of the twenty naturally occurring L-amino acids
  MISC_FEATURE (150): Xaa equals any of the twenty naturally occurring L-amino acids
  MISC_FEATURE (153): Xaa equals any of the twenty naturally occurring L-amino acids
  MISC_FEATURE (159): Xaa equals any of the twenty naturally occurring L-amino acids
  MISC_FEATURE (162): Xaa equals any of the twenty naturally occurring L-amino acids
PIWFRGXPQVPVRNSRVDPRVRPXFLAPGPVLFSSMVCLKLPGGSCMTALTVTLMVLSSPLALAGDTRPRFLWQPKRECHFFNGTERVRFLDRYFYNQEESVRFDSDVGEYRAVTELGRLTLSTGTXRRTSWKTGAPRRTPTADTTTXLXKSXQCNGRXQPXVTGYSLK

SEQ ID NO: 3349 - protein, 45 aa, Homo sapiens
  MISC_FEATURE (17): Xaa equals any of the twenty naturally occurring L-amino acids
  MISC_FEATURE (21): Xaa equals any of the twenty naturally occurring L-amino acids
  MISC_FEATURE (29): Xaa equals any of the twenty naturally occurring L-amino acids
  MISC_FEATURE (31): Xaa equals any of the twenty naturally occurring L-amino acids
  MISC_FEATURE (40): Xaa equals any of the twenty naturally occurring L-amino acids
PTGPEFPGRPTRPYFSXFRLXVVPLFFLXTXLFSKSKDPXMNNSV

SEQ ID NO: 3350 - protein, 93 aa, Homo sapiens
  MISC_FEATURE (16): Xaa equals any of the twenty naturally occurring L-amino acids
VERPRYRSGIPGSTHXSAEGFNISEEALNHLGEIGTKTTLRYSVQLLTPANLLAKINGKDSIEKEHVEEISELFYDAKSSAKILADQQDKYMK

SEQ ID NO: 3351 - protein, 101 aa, Homo sapiens
  MISC_FEATURE (1): Xaa equals any of the twenty naturally occurring L-amino acids
  MISC_FEATURE (26): Xaa equals any of the twenty naturally occurring L-amino acids
XNAPWDKVPNSRVDPRVREGFVTPGXCFPISVWGYRIGWQKCHPVGVSLGGSSPRPPPHLHKAPLKQERGSQGCKTGSTASGMGRERRCYIQFLLSAHGWL

SEQ ID NO: 3352 - protein, 203 aa, Homo sapiens
  MISC_FEATURE (15): Xaa equals any of the twenty naturally occurring L-amino acids
  MISC_FEATURE (20): Xaa equals any of the twenty naturally occurring L-amino acids
  MISC_FEATURE (26): Xaa equals any of the twenty naturally occurring L-amino acids
  MISC_FEATURE (40): Xaa equals any of the twenty naturally occurring L-amino acids
  MISC_FEATURE (180): Xaa equals any of the twenty naturally occurring L-amino acids
  MISC_FEATURE (199): Xaa equals any of the twenty naturally occurring L-amino acids
NAPRYRSGIPGSTHXSAAAXGAAAMXAHLEWMVVRNCSSXLIKRNKQTYSTEPNNLKARNSFRYNGLIHRKTVGVEPAADGKGVVVVIKRRSGQRKPATSYVRTTINKNARATLSSIRHMIRKNKYRPDLRMAAIRRASAILRSQKPVMVKRKRTRPPRAPEPPAPRAIKSAGFLKKKKXKKRAAALEDPSLRTRACDXIALL

SEQ ID NO: 3353 - protein, 71 aa, Homo sapiens
ERLCLDNYGGGNYGSGNYNDFGNYNQQPSNYGPMKSGNFGGSRNMGGPYGGGNYGPGGSGGSGGYGGRSRY

SEQ ID NO: 3354 - protein, 139 aa, Homo sapiens
  MISC_FEATURE (52): Xaa equals any of the twenty naturally occurring L-amino acids
DNPIQTVSLGQSLFFHFPPLLRDGENYVVLLDSTLPRSQYDYILPQVSFTAXGYHKHITLIFNPTRKLPEQDIAQGSYIALPLTLLVLLAGYNHDKLIPLLLQLTSRLQGVRALGQAASDNSGPEDAKRQAKKQKTRRT

SEQ ID NO: 3355 - protein, 53 aa, Homo sapiens
LPQLNGYIEKSTPYECGFDPISPARVPFSIKFFLVAITFLLFDLEIALLLPLP

SEQ ID NO: 3356 - protein, 179 aa, Homo sapiens
  MISC_FEATURE (132): Xaa equals any of the twenty naturally occurring L-amino acids
  MISC_FEATURE (177): Xaa equals any of the twenty naturally occurring L-amino acids
LKSGMKELAVFREKVTEQHRQMGKGGKHHLGLEEPKKLRPPPARTPCQQELDQVLERISTMRLPDERGPLEHLYSLHIPNCDKHGLYNLKQCKMSLNGHVGNAGVLNPTPGTDPRNPHIRGDPNVISSTMTXELAGCTPADAVNATSGAAPCPRPLQTPAKTKSWLWSGRFHLNLLXWK

SEQ ID NO: 3357 - protein, 154 aa, Homo sapiens
  MISC_FEATURE (1): Xaa equals any of the twenty naturally occurring L-amino acids
  MISC_FEATURE (28): Xaa equals any of the twenty naturally occurring L-amino acids
  MISC_FEATURE (45): Xaa equals any of the twenty naturally occurring L-amino acids
  MISC_FEATURE (49): Xaa equals any of the twenty naturally occurring L-amino acids
  MISC_FEATURE (53): Xaa equals any of the twenty naturally occurring L-amino acids
XTRPPTRPRTRGPKAKKEAPAPPKAEAXAKALKAKKAVLKGVHSXKKKXIRTXPTFRRPKTLRLRRQPKYPRKSAPRRNKLDHYAIIKFPLTTESAMKKIEDNNTLVFIVDVKANKHQIKQAVKKLYDIDVAKVNTLIRPDGEKKAYVRLAPDY

SEQ ID NO: 3358 - protein, 56 aa, Homo sapiens
  MISC_FEATURE (46): Xaa equals any of the twenty naturally occurring L-amino acids
IFILQLLCIWVYITTYANQGSENWRLAISIISFCTLGTVGGISMHXLQNPQHLRGK

SEQ ID NO: 3359 - protein, 89 aa, Homo sapiens; identical to SEQ ID NO: 3245

SEQ ID NO: 3360 - protein, 94 aa, Homo sapiens
  MISC_FEATURE (2): Xaa equals any of the twenty naturally occurring L-amino acids
  MISC_FEATURE (76): Xaa equals any of the twenty naturally occurring L-amino acids
  MISC_FEATURE (83): Xaa equals any of the twenty naturally occurring L-amino acids
  MISC_FEATURE (93): Xaa equals any of the twenty naturally occurring L-amino acids
CXVGTLVGEDKYGNKYYEDNKQFFGRHRWVVYTTEMNGKNTFWGCGWEAWCLLKWHRWLHSMTDGSSNNKTTYCSXNSLGRNXKFQRGLGTPXT

SEQ ID NO: 3361 - protein, 67 aa, Homo sapiens
  MISC_FEATURE (62): Xaa equals any of the twenty naturally occurring L-amino acids
GARRQAHTMALKRINKELSDLARDPPAQCSAGPVGDDMFHWQATIMGPNDSPYQGGVFFLTXHFPTD

SEQ ID NO: 3362 - protein, 75 aa, Homo sapiens
WGLQFLSWLGKSLAGNRGRLCSNCIKQFWWVCCNCSVSLGSHLALWGLALLKRSLGSVFGSSIIRSSKSPVLSKG

SEQ ID NO: 3363 - protein, 38 aa, Homo sapiens
FFGHPEVYILILPGFGIISHIVTYYSGKKEPFGYIGMV

SEQ ID NO: 3364 - protein, 62 aa, Homo sapiens
HRFLKTRILNVKHPFSLFTSKPKIMCCQNQTQVHEYGVYYSETCTLSLLVLFCIKYFQGFKH

SEQ ID NO: 3365 - protein, 96 aa, Homo sapiens
SSLSIPSTSCRSCRSCRSCRDTVHHMLLFGCNMPSSTGSYWFCDEGTCTDKANILYAWARNAPPTRLPKGVGFRVGGETGSKYFVLQVHYGDIKCF

SEQ ID NO: 3366 - protein, 56 aa, Homo sapiens
RSDHLKTHTRTHTGKTSEKPFSCRWPSCQKKFARSDELVRHHNMHQRNMTKLQLAL

SEQ ID NO: 3367 - protein, 115 aa, Homo sapiens
  MISC_FEATURE (90): Xaa equals any of the twenty naturally occurring L-amino acids
  MISC_FEATURE (94): Xaa equals any of the twenty naturally occurring L-amino acids
  MISC_FEATURE (101): Xaa equals any of the twenty naturally occurring L-amino acids
  MISC_FEATURE (111): Xaa equals any of the twenty naturally occurring L-amino acids
  MISC_FEATURE (112): Xaa equals any of the twenty naturally occurring L-amino acids
LGAPEVWGLSPKNPEPDSDEHTPVEDEEPKKSTTSASTSEEEKKKKSSRSKERSKKRRKKKSSKRKHKKYSEDSDSDSDSETDSSDEDNXRRAXKAKKKEXKKKHRSKKYXXKRS

SEQ ID NO: 3368 - protein, 42 aa, Homo sapiens
SICLSQRLSHACLSTHGRYSETANGSLNQLWFLWSLAPLLLG

SEQ ID NO: 3369 - protein, 59 aa, Homo sapiens
  MISC_FEATURE (28): Xaa equals any of the twenty naturally occurring L-amino acids
LPQLNGYIEKSTPYECGFDPISPARVPXSIKFFLVAITFLLFDLENCPPFTPTMSPTNN

SEQ ID NO: 3370 - protein, 100 aa, Homo sapiens
  MISC_FEATURE (55): Xaa equals any of the twenty naturally occurring L-amino acids
  MISC_FEATURE (64): Xaa equals any of the twenty naturally occurring L-amino acids
  MISC_FEATURE (66): Xaa equals any of the twenty naturally occurring L-amino acids
  MISC_FEATURE (69): Xaa equals any of the twenty naturally occurring L-amino acids
  MISC_FEATURE (78): Xaa equals any of the twenty naturally occurring L-amino acids
  MISC_FEATURE (81): Xaa equals any of the twenty naturally occurring L-amino acids
  MISC_FEATURE (96): Xaa equals any of the twenty naturally occurring L-amino acids
MPFPTPLPWVQGPSGPSSEHGQHRLLDPCVPASADAAGGREHGFGGGEVTPGPRXGWAVCLVQXDXGIXEGGQVSEAXLAXFVNSHEIVQGFPAPXLDDN

SEQ ID NO: 3371 - protein, 29 aa, Homo sapiens
  MISC_FEATURE (18): Xaa equals any of the twenty naturally occurring L-amino acids
  MISC_FEATURE (21): Xaa equals any of the twenty naturally occurring L-amino acids
TITNTTNQYSSLIIIMAXAIXLGIAPFHF

SEQ ID NO: 3372 - protein, 88 aa, Homo sapiens
  MISC_FEATURE (79): Xaa equals any of the twenty naturally occurring L-amino acids
  MISC_FEATURE (81): Xaa equals any of the twenty naturally occurring L-amino acids
  MISC_FEATURE (86): Xaa equals any of the twenty naturally occurring L-amino acids
  MISC_FEATURE (87): Xaa equals any of the twenty naturally occurring L-amino acids
  MISC_FEATURE (88): Xaa equals any of the twenty naturally occurring L-amino acids
QLSTLINWLQSTSPAAGKKGGRSPGRFEAASSNLQFNMKITSELVKRGLTPVFRFTVQCFTSAIYLHPQKKKKKTRGGXPXPIRPXXX

SEQ ID NO: 3373 - protein, 136 aa, Homo sapiens
  MISC_FEATURE (3): Xaa equals any of the twenty naturally occurring L-amino acids
  MISC_FEATURE (9): Xaa equals any of the twenty naturally occurring L-amino acids
  MISC_FEATURE (18): Xaa equals any of the twenty naturally occurring L-amino acids
  MISC_FEATURE (27): Xaa equals any of the twenty naturally occurring L-amino acids
  MISC_FEATURE (63): Xaa equals any of the twenty naturally occurring L-amino acids
DRXWYASIXTGFRKFPGXPTRPFTLRXLHCPLGVRPPTRARPPARPPARAMNAKVVVVLVLVXTALCLSDGKPVSLSYRCPCRFFESHVARANVKHLKILNTPNCALQIVARLKNNNRQVCIDPKLKWIQEYWRKL

SEQ ID NO: 3374 - protein, 40 aa, Homo sapiens
TILPAIILVLIALPSLRILYITDEVNDPSLTIKSIGHQWY

SEQ ID NO: 3375 - protein, 70 aa, Homo sapiens
  MISC_FEATURE (1): Xaa equals any of the twenty naturally occurring L-amino acids
  MISC_FEATURE (17): Xaa equals any of the twenty naturally occurring L-amino acids
XIINTLLALLLIIITFXLPQLNGYIEKSTPYECGFDPISPARVPFSIKFFLVAITFLLFDLEIALLLPLP

SEQ ID NO: 3376 - protein, 40 aa, Homo sapiens
ALPAPVVSREMENLMTSSTLPPLFADEDGSKESNDLATTG

SEQ ID NO: 3377 - protein, 28 aa, Homo sapiens
  MISC_FEATURE (23): Xaa equals any of the twenty naturally occurring L-amino acids
GAPSGTGDCPDPGEVPEYPPYYXEEAGY

SEQ ID NO: 3378 - protein, 53 aa, Homo sapiens
VGLEINMLAFIPVLTKKINPRSTEAAIKYFLTQATASIILLIAILFNNILSGQ

SEQ ID NO: 3379 - protein, 90 aa, Homo sapiens
APECFAHLTQLLQVLAGGRVCAVLEGGYHLESLAESVCMTVQTLLGDPAPPLSGPMAPCQSALESIQSARAAQAPHWKSLQQQRCDPLCR

SEQ ID NO: 3380 - protein, 99 aa, Homo sapiens
GKGECRAEQKPEPDGEPPPLPGTDMAQRMTTQLLLLLVWVAVVGEAQTRIAWARTELLNVCMNAKHHKEKPGPEDKLHEQCRPWRKNACCSYQHQPGSP

SEQ ID NO: 3381 - protein, 80 aa, Homo sapiens
  MISC_FEATURE (2): Xaa equals any of the twenty naturally occurring L-amino acids
  MISC_FEATURE (5): Xaa equals any of the twenty naturally occurring L-amino acids
  MISC_FEATURE (14): Xaa equals any of the twenty naturally occurring L-amino acids
  MISC_FEATURE (17): Xaa equals any of the twenty naturally occurring L-amino acids
  MISC_FEATURE (20): Xaa equals any of the twenty naturally occurring L-amino acids
  MISC_FEATURE (23): Xaa equals any of the twenty naturally occurring L-amino acids
  MISC_FEATURE (28): Xaa equals any of the twenty naturally occurring L-amino acids
  MISC_FEATURE (38): Xaa equals any of the twenty naturally occurring L-amino acids
  MISC_FEATURE (42): Xaa equals any of the twenty naturally occurring L-amino acids
  MISC_FEATURE (44): Xaa equals any of the twenty naturally occurring L-amino acids
  MISC_FEATURE (50): Xaa equals any of the twenty naturally occurring L-amino acids
  MISC_FEATURE (78): Xaa equals any of the twenty naturally occurring L-amino acids
  MISC_FEATURE (79): Xaa equals any of the twenty naturally occurring L-amino acids
GXPSXSRGGPVPKXPYXESXYNXLAVDXQRRDWENPGXTQLXRXAAHPPXASWRNKRRGPHRSPYPTVVQPEWRMANXXR

SEQ ID NO: 3382 - protein, 99 aa, Homo sapiens
  MISC_FEATURE (11): Xaa equals any of the twenty naturally occurring L-amino acids
ILSGPYAVVLXPLKMPTKGMEDESPVSIPLTVKLKYACTLITFYFRCLYNCKDIVLRRNTAGSLGFCIVGGYEEYNGNKPFFIKSIVEGTPAYNDGRIR

SEQ ID NO: 3383 - protein, 41 aa, Homo sapiens
  MISC_FEATURE (35): Xaa equals any of the twenty naturally occurring L-amino acids
TPHVSFFFSQLLDKIDVIKQADYVPSDQDLLRCRXLTSGIF

SEQ ID NO: 3384 - protein, 59 aa, Homo sapiens
  MISC_FEATURE (5): Xaa equals any of the twenty naturally occurring L-amino acids
LPQLXGYIEKSTPYECGFDPISPARVPFSIKFFLVAITFLLFDLEIALLLPLPCSPTNN

SEQ ID NO: 3385 - protein, 158 aa, Homo sapiens
  MISC_FEATURE (4): Xaa equals any of the twenty naturally occurring L-amino acids
  MISC_FEATURE (42): Xaa equals any of the twenty naturally occurring L-amino acids
  MISC_FEATURE (71): Xaa equals any of the twenty naturally occurring L-amino acids
  MISC_FEATURE (85): Xaa equals any of the twenty naturally occurring L-amino acids
  MISC_FEATURE (107): Xaa equals any of the twenty naturally occurring L-amino acids
  MISC_FEATURE (111): Xaa equals any of the twenty naturally occurring L-amino acids
  MISC_FEATURE (126): Xaa equals any of the twenty naturally occurring L-amino acids
  MISC_FEATURE (135): Xaa equals any of the twenty naturally occurring L-amino acids
  MISC_FEATURE (149): Xaa equals any of the twenty naturally occurring L-amino acids
ADAXVVFRRFVEVGRVAYVSFGPHAGKLVAIVDVIDQNRALXDGPCTQVRRQAMPFKCMQLTDFILKFPHXAHQKYVRQAWQKAXINTKWAATRWAKKIEARERKAXMTDXDRFKVMKAKKMRNRXIKNEVKKLXKAALLKASSKKAPXTKGTAAAAA

SEQ ID NO: 3386 - protein, 75 aa, Homo sapiens
  MISC_FEATURE (16): Xaa equals any of the twenty naturally occurring L-amino acids
  MISC_FEATURE (71): Xaa equals any of the twenty naturally occurring L-amino acids
VRGSRGSQRLALPLRXAGGRPRRGLAGVGEGGPQCSWVNYRCTLEFLVSLLGTDLARGRGNSVSGPTAPAXSKQL

SEQ ID NO: 3387 - protein, 82 aa, Homo sapiens
  MISC_FEATURE (16): Xaa equals any of the twenty naturally occurring L-amino acids
  MISC_FEATURE (29): Xaa equals any of the twenty naturally occurring L-amino acids
  MISC_FEATURE (42): Xaa equals any of the twenty naturally occurring L-amino acids
  MISC_FEATURE (51): Xaa equals any of the twenty naturally occurring L-amino acids
PRVAEPLRAPGRSVMXGQSQPRDDVGSPXPGYCRNHRPRVIXGTIRPGKSXVCAARPHKRDSPPKLRPKVSRPKASSDARAR

SEQ ID NO: 3388 - protein, 20 aa, Homo sapiens
SSLIIIMAIAIKLGIAPFHF

SEQ ID NO: 3389 - protein, 22 aa, Homo sapiens
FHFHSITLLILGLLTNTLTIYQ

SEQ ID NO: 3390 - protein, 53 aa, Homo sapiens
  MISC_FEATURE (18): Xaa equals any of the twenty naturally occurring L-amino acids
  MISC_FEATURE (37): Xaa equals any of the twenty naturally occurring L-amino acids
YFLFAYTILRSVPNKLGXVLALLLSILILAIIPILHXSKQQSIIFRPLSQSLY

SEQ ID NO: 3391 - protein, 89 aa, Homo sapiens
  MISC_FEATURE (82): Xaa equals any of the twenty naturally occurring L-amino acids
SCILNHSSRILYPRPKSLLPKMMNADMDVDAENQVELEEKTRLINQVLELQHTLEDLSARVDAVKEENLKLKSENQGLGQYXENFMASF

SEQ ID NO: 3392 - protein, 54 aa, Homo sapiens
FLGKVLFLLTLTVDVLIEKFIVSFVILPDVMLDIFYMRVSHPHPGIAWIQYKNR

SEQ ID NO: 3393 - protein, 46 aa, Homo sapiens
LRMYPLKPTWWFCAFPYSLLIFVYDEVRKLIIRRRPGGWVEKETYY

SEQ ID NO: 3394 - protein, 83 aa, Homo sapiens
GSSRGRVSCRIPVQKPTEAQSRQGLTDLCWYLGAWIAELSLLEGKWGGVGGPDRPGCQSASAKTTLAVHIASREAKLQASALP

SEQ ID NO: 3395 - protein, 122 aa, Homo sapiens
ETELAMRQSVENDIHGLRKVIDDTNITRLQLETEIEALKEELLFMKKNHEEEVKGLQAQIASSGLTVEVDAPKSQDLAKIMADIRAQYDELARKNREELDKYWSQQIEESTTVVTTQSAEVG

SEQ ID NO: 3396 - protein, 26 aa, Homo sapiens
EQGEVDMESHRNANAEPAVQRTLLEK

SEQ ID NO: 3397 - protein, 160 aa, Homo sapiens
SSTKSKMAASRRLMKELEEIRKCGMKNFRNIQVDEANLLTWQGLIVPDNPPYDKGAFRIEINFPAEYPFKPPKITFKTKIYHPNIDEKGQVCLPVISAENWKPATKTDQVIQSLIALVNDPQPEHPLRADLAEEYSKDRKKFCKNAEEFTKKYGEKRPVD

SEQ ID NO: 3398 - protein, 88 aa, Homo sapiens
DLSMSSVKVDGIRMSFQNLLAKICFHHHFSVVERVDSCASMYSRSIQGHHVCLLVKKGENSVSVDGKCSDSTLLSNLLEEMKATLAKC

SEQ ID NO: 3399 - protein, 154 aa, Homo sapiens
FAHLDATTVLSRAIAELGIYPAVDPLDSTSRIMDPNIVGSEHYDVARGVQKILQDYKSLQDIIAILGMDELSEEDKLTVSRARKIQRFLSQPFQVAEVFTGHMGKLVPLKETIKGFQQILAGEYDHLPEQAFYMVGPIEEAVAKADKLAEEHSS

SEQ ID NO: 3400 - protein, 92 aa, Homo sapiens
DSYETSQLDDQSAETHSHKQSRLYKRKANDESNEHSDVIDSQDLSKVSREFHSHEFHSHEDMLVVDPKSKEEDKHLKFRISHELDSASSEVN

SEQ ID NO: 3401 - protein, 34 aa, Homo sapiens
RLDAMFRAFKSLDKDGTGQIQVNIQEWLQLTMYS

SEQ ID NO: 3402 - protein, 137 aa, Homo sapiens
ANMGRVRTKTVKKAARVIIEKYYTRLGNDFHTNKRVCEEIAIIPSKKLRNKIAGYVTHLMKRIQRGPVRGISIKLQEEERERRDNYVPEVSALDQEIIEVDPDTKEMLKLLDFGSLSNLQVTQPTVGMNFKTPRGPV

SEQ ID NO: 3403 - protein, 54 aa, Homo sapiens
CRRPGGEPSPEGTTGQSYNQYSQRYHQRTNTNVNCPIECFMPLDVQADREDSRE

SEQ ID NO: 3404 - protein, 75 aa, Homo sapiens
FTKAQVQSHFKALGVAQSTLVSGSINVDDSLESFICLSRTNVFTLLIKYRKGGLGSKLFFTFQTCDTLRLSIAMQ

SEQ ID NO: 3405 - protein, 173 aa, Homo sapiens
AAMARGPKKHLKRVAAPKHWMLDKLTGVFAPRPSTGPHKLRECLPLIIFLRNRLKYALTGDEVKKICMQRFIKIDGKVRTDITYPAGFMDVISIDKTGENFRLIYDTKGRFAVHRITPEEAKYKLCKVRKIFVGTKGIPHLVTHDARTIRYPDPLIKVNDTIQIDLETGKITD

SEQ ID NO: 3406 - protein, 127 aa, Homo sapiens
AAINRQINLELYASYVYLSMSYYFDRDDVALKNFAKYFLHQSHEEREHAEKLMKLQNQRGGRIFLQDIKKPDCDDWESGLNAMECALHLEKNVNQSLLELHKLATDKNDPHLCDFIETHYLNEQVKA

SEQ ID NO: 3407 - protein, 37 aa, Homo sapiens
APTILGLPAAVLIILFPPLLIPTSKYLINNRLITTQQ

SEQ ID NO: 3408 - protein, 63 aa, Homo sapiens
  MISC_FEATURE (17): Xaa equals any of the twenty naturally occurring L-amino acids
  MISC_FEATURE (47): Xaa equals any of the twenty naturally occurring L-amino acids
  MISC_FEATURE (53): Xaa equals any of the twenty naturally occurring L-amino acids
  MISC_FEATURE (57): Xaa equals any of the twenty naturally occurring L-amino acids
  MISC_FEATURE (60): Xaa equals any of the twenty naturally occurring L-amino acids
  MISC_FEATURE (63): Xaa equals any of the twenty naturally occurring L-amino acids
TAARRRQKGGEKPFECXQCSYVASNQHEVTRHARQVHNGPKPLNCPXCDCKQXDRSXFKXHVX

SEQ ID NO: 3409 - protein, 50 aa, Homo sapiens
  MISC_FEATURE (4): Xaa equals any of the twenty naturally occurring L-amino acids
  MISC_FEATURE (50): Xaa equals any of the twenty naturally occurring L-amino acids
FLVXLKQVAVRNSRVDPRVRPLQLLAFHLAVLRGYDVDFPRNLAKSVTVX

SEQ ID NO: 3410 - protein, 73 aa, Homo sapiens
  MISC_FEATURE (11): Xaa equals any of the twenty naturally occurring L-amino acids
  MISC_FEATURE (12): Xaa equals any of the twenty naturally occurring L-amino acids
  MISC_FEATURE (15): Xaa equals any of the twenty naturally occurring L-amino acids
  MISC_FEATURE (16): Xaa equals any of the twenty naturally occurring L-amino acids
  MISC_FEATURE (19): Xaa equals any of the twenty naturally occurring L-amino acids
  MISC_FEATURE (20): Xaa equals any of the twenty naturally occurring L-amino acids
  MISC_FEATURE (21): Xaa equals any of the twenty naturally occurring L-amino acids
  MISC_FEATURE (28): Xaa equals any of the twenty naturally occurring L-amino acids
  MISC_FEATURE (34): Xaa equals any of the twenty naturally occurring L-amino acids
  MISC_FEATURE (35): Xaa equals any of the twenty naturally occurring L-amino acids
  MISC_FEATURE (38): Xaa equals any of the twenty naturally occurring L-amino acids
  MISC_FEATURE (43): Xaa equals any of the twenty naturally occurring L-amino acids
  MISC_FEATURE (46): Xaa equals any of the twenty naturally occurring L-amino acids
  MISC_FEATURE (50): Xaa equals any of the twenty naturally occurring L-amino acids
  MISC_FEATURE (53): Xaa equals any of the twenty naturally occurring L-amino acids
  MISC_FEATURE (58): Xaa equals any of the twenty naturally occurring L-amino acids
  MISC_FEATURE (59): Xaa equals any of the twenty naturally occurring L-amino acids
  MISC_FEATURE (61): Xaa equals any of the twenty naturally occurring L-amino acids
VLRKVPHILFXXFFXXGAXXXGGERVRXLNRWVXXGFXKNLFXEFXSQTXFPXLEGGXXSXGRVPQGFSKGVW

SEQ ID NO: 3411 - protein, 85 aa, Homo sapiens
STPLWCPATASDAAPLQYLAPYSGCSMGEYFRDNGKHALIIYDDLSKQAVAYRQMSLLLRRPPGVRPILVMCSTYTPGCWREQPK

SEQ ID NO: 3412 - protein, 98 aa, Homo sapiens
KIVDVIRQEVLESSQVTFVHHLQAFASKITGMLLELSPAQLLLLLASEDSLRARVDEAMELIIAHGRENGLDSILDLGLVNPPEKVQQGKPKAPWLYR

SEQ ID NO: 3413 - protein, 85 aa, Homo sapiens
  MISC_FEATURE (1): Xaa equals any of the twenty naturally occurring L-amino acids
  MISC_FEATURE (3): Xaa equals any of the twenty naturally occurring L-amino acids
  MISC_FEATURE (18): Xaa equals any of the twenty naturally occurring L-amino acids
  MISC_FEATURE (75): Xaa equals any of the twenty naturally occurring L-amino acids
XLXEATESRHKYEQMKQXEVQLKQQLSLYMDKFEEFQTTMAKSNELVTTFRQEMEKMTKKIKKLEKETIIWRTKXETIIKHFANG

SEQ ID NO: 3414 - protein, 112 aa, Homo sapiens
  MISC_FEATURE (55): Xaa equals any of the twenty naturally occurring L-amino acids
  MISC_FEATURE (79): Xaa equals any of the twenty naturally occurring L-amino acids
  MISC_FEATURE (91): Xaa equals any of the twenty naturally occurring L-amino acids
  MISC_FEATURE (104): Xaa equals any of the twenty naturally occurring L-amino acids
  MISC_FEATURE (110): Xaa equals any of the twenty naturally occurring L-amino acids
GVRSQRSVLFIIASFCCYLQTEEPASDKGSEAEAHMPPPFTPYVPRILNGLASEXTGTVSAAAAAADLWCHPQHPAGTXPWDSGLGAKHRXPVLGCWPPQEGLXAWGSSXFF

SEQ ID NO: 3415 - protein, 73 aa, Homo sapiens
FYPVAKNFFNCGFKKIIKYTCIYIYIYIYIYIYIYIYIYFFNVSFPQRNQSLGMSRNILADFASVNQACTHAQ

SEQ ID NO: 3416 - protein, 79 aa, Homo sapiens
LLLIVPILIAMAFLMLTERKILGYIQLRKGPNVVGPYGLLQPFADAIKLFTKEPLKPATSTITLYITAPTLALTIALLL

SEQ ID NO: 3417 - protein, 23 aa, Homo sapiens
  MISC_FEATURE (6): Xaa equals any of the twenty naturally occurring L-amino acids
GKVKKXKRNSANLTPPVYQKHHL

SEQ ID NO: 3418 - protein, 53 aa, Homo sapiens; identical to SEQ ID NO: 3378

SEQ ID NO: 3419 - protein, 53 aa, Homo sapiens
FPLFSGYTLDQTYAKIHFTIIFIGVNLTFFPQHFLGLSGMPRRYSDYPDAYTT

SEQ ID NO: 3420 - protein, 60 aa, Homo sapiens
  MISC_FEATURE (5): Xaa equals any of the twenty naturally occurring L-amino acids
  MISC_FEATURE (28): Xaa equals any of the twenty naturally occurring L-amino acids
  MISC_FEATURE (35): Xaa equals any of the twenty naturally occurring L-amino acids
  MISC_FEATURE (40): Xaa equals any of the twenty naturally occurring L-amino acids
  MISC_FEATURE (42): Xaa equals any of the twenty naturally occurring L-amino acids
  MISC_FEATURE (47): Xaa equals any of the twenty naturally occurring L-amino acids
  MISC_FEATURE (53): Xaa equals any of the twenty naturally occurring L-amino acids
  MISC_FEATURE (55): Xaa equals any of the twenty naturally occurring L-amino acids
  MISC_FEATURE (56): Xaa equals any of the twenty naturally occurring L-amino acids
  MISC_FEATURE (57): Xaa equals any of the twenty naturally occurring L-amino acids
  MISC_FEATURE (60): Xaa equals any of the twenty naturally occurring L-amino acids
FLLGXKSVESVPKLVSEYMSKKIKVDEXVTHNLSXDEINXAXDLDAXWKKVGXLXXXHRX

SEQ ID NO: 3421 - protein, 47 aa, Homo sapiens
LYGCPPPYHTFEEPVYIKSRQKRKESNPPKLVSSQPHGLHDFFKKKK

SEQ ID NO: 3422 - protein, 65 aa, Homo sapiens
  MISC_FEATURE (1): Xaa equals any of the twenty naturally occurring L-amino acids
  MISC_FEATURE (12): Xaa equals any of the twenty naturally occurring L-amino acids
  MISC_FEATURE (58): Xaa equals any of the twenty naturally occurring L-amino acids
  MISC_FEATURE (59): Xaa equals any of the twenty naturally occurring L-amino acids
  MISC_FEATURE (60): Xaa equals any of the twenty naturally occurring L-amino acids
  MISC_FEATURE (61): Xaa equals any of the twenty naturally occurring L-amino acids
  MISC_FEATURE (64): Xaa equals any of the twenty naturally occurring L-amino acids
XGKMVSLQYRSXIPGRPTRPTSSRSRAAPFFFFFFFFFFFFFFFFFFFFFFFFFFFFXXXXFFXF

SEQ ID NO: 3423 - protein, 116 aa, Homo sapiens
  MISC_FEATURE (90): Xaa equals any of the twenty naturally occurring L-amino acids
  MISC_FEATURE (91): Xaa equals any of the twenty naturally occurring L-amino acids
  MISC_FEATURE (97): Xaa equals any of the twenty naturally occurring L-amino acids
  MISC_FEATURE (105): Xaa equals any of the twenty naturally occurring L-amino acids
NGSVAGTKFWLRRKLVPPTVRSREGTCILCSPEDQAPLGKRQDSGRWVNALSLEQEASFWGRQVLRQALAWGLPQVEERSGAPWKQCSSXXRKPRWXGGSLSLWXQGERPTETHYP

SEQ ID NO: 3424 - protein, 96 aa, Homo sapiens
  MISC_FEATURE (2): Xaa equals any of the twenty naturally occurring L-amino acids
  MISC_FEATURE (6): Xaa equals any of the twenty naturally occurring L-amino acids
  MISC_FEATURE (9): Xaa equals any of the twenty naturally occurring L-amino acids
HXETFXDRXKLVRLQVPVRNSRVDPRVRRELDEATESNEAMGREVNALKSKLRRGNETSFVPSRRSGGRRVIENADGSEEETDTRDADFNGTKASE

SEQ ID NO: 3425 - protein, 121 aa, Homo sapiens
  MISC_FEATURE (7): Xaa equals any of the twenty naturally occurring L-amino acids
  MISC_FEATURE (12): Xaa equals any of the twenty naturally occurring L-amino acids
  MISC_FEATURE (17): Xaa equals any of the twenty naturally occurring L-amino acids
  MISC_FEATURE (25): Xaa equals any of the twenty naturally occurring L-amino acids
  MISC_FEATURE (26): Xaa equals any of the twenty naturally occurring L-amino acids
  MISC_FEATURE (40): Xaa equals any of the twenty naturally occurring L-amino acids
  MISC_FEATURE (50): Xaa equals any of the twenty naturally occurring L-amino acids
  MISC_FEATURE (106): Xaa equals any of the twenty naturally occurring L-amino acids
GRRLQQXLLWIXWTMVXCSFDLQKXXRRNSRRAWKANKPXKNLPVKKIPXKTSAPSGSFFARDNTANFLSWCRDLGVDETCLFESEGLVLHKQPREVSLCLLELGXDCSQEGRTRINFKKS

SEQ ID NO: 3426 - protein, 93 aa, Homo sapiens
  MISC_FEATURE (89): Xaa equals any of the twenty naturally occurring L-amino acids
RSEVKAGMERELENIIQETEKELDPDGLKKESERDRAMLALTSTLNKLIKRLEEKQSPELVKKHKKKRVVPKKPPPSPQPTGKIEIKIXRPWA

SEQ ID NO: 3427 - protein, 151 aa, Homo sapiens
  MISC_FEATURE (1): Xaa equals any of the twenty naturally occurring L-amino acids
  MISC_FEATURE (15): Xaa equals any of the twenty naturally occurring L-amino acids
  MISC_FEATURE (117): Xaa equals any of the twenty naturally occurring L-amino acids
XTPRNSRVDPRVRVXLSLASTVFGRNRSGDSLPASDRPPISSPLATSGTIFSAISCFWDLPAPFLWLAPSCQPTMSSQIRQNYSTDVEAAVNSLVNLYLQASYTYLSLGFYFDRDDXALEGVSHFFRELLEEKREGYERLLKMQNQRGGRF

SEQ ID NO: 3428 - protein, 117 aa, Homo sapiens
  MISC_FEATURE (3): Xaa equals any of the twenty naturally occurring L-amino acids
  MISC_FEATURE (27): Xaa equals any of the twenty naturally occurring L-amino acids
GPXARSVRNPRVDPRVRSFPKYKPSSXRTLPETLDPAEYNISPETRRAQAERLAIRAQLKREYLLQYNDPNRRGLIENPALLRWAYARTINVYPNFRPTPKNSLMGALCGFGPLIFI

SEQ ID NO: 3429 - protein, 131 aa, Homo sapiens
  MISC_FEATURE (104): Xaa equals any of the twenty naturally occurring L-amino acids
  MISC_FEATURE (117): Xaa equals any of the twenty naturally occurring L-amino acids
  MISC_FEATURE (123): Xaa equals any of the twenty naturally occurring L-amino acids
  MISC_FEATURE (129): Xaa equals any of the twenty naturally occurring L-amino acids
  MISC_FEATURE (131): Xaa equals any of the twenty naturally occurring L-amino acids
GCVGVRPSLHPATSTASGSASPTLARAMASVSELACIYSALILHDDEVTVTEDKINALIKAAGVNVEPFWPGLFAKALANVNIGSLICNVGAGGPAPAAGAAPXRRSCPSTGAAPAXEKKVEXKKEESXEX

SEQ ID NO: 3430 - protein, 75 aa, Homo sapiens
  MISC_FEATURE (27): Xaa equals any of the twenty naturally occurring L-amino acids
  MISC_FEATURE (43): Xaa equals any of the twenty naturally occurring L-amino acids
DCPNVQNYIILTLKSCERVAAASLAHXDFKPKEELLDQDAQPXDQKPSKYCHEKLEGQVFIKKPFWNPPFLAPGG

SEQ ID NO: 3431 - protein, 39 aa, Homo sapiens
  MISC_FEATURE (15): Xaa equals any of the twenty naturally occurring L-amino acids
  MISC_FEATURE (21): Xaa equals any of the twenty naturally occurring L-amino acids
  MISC_FEATURE (25): Xaa equals any of the twenty naturally occurring L-amino acids
  MISC_FEATURE (32): Xaa equals any of the twenty naturally occurring L-amino acids
  MISC_FEATURE (33): Xaa equals any of the twenty naturally occurring L-amino acids
  MISC_FEATURE (37): Xaa equals any of the twenty naturally occurring L-amino acids
ESFPFLRLNHSLDVXSRFMAXFLMXKCLTASXXYWVXLG

SEQ ID NO: 3432 - protein, 183 aa, Homo sapiens
  MISC_FEATURE (4): Xaa equals any of the twenty naturally occurring L-amino acids
  MISC_FEATURE (11): Xaa equals any of the twenty naturally occurring L-amino acids
  MISC_FEATURE (12): Xaa equals any of the twenty naturally occurring L-amino acids
  MISC_FEATURE (13): Xaa equals any of the twenty naturally occurring L-amino acids
  MISC_FEATURE (22): Xaa equals any of the twenty naturally occurring L-amino acids
  MISC_FEATURE (33): Xaa equals any of the twenty naturally occurring L-amino acids
  MISC_FEATURE (83): Xaa equals any of the twenty naturally occurring L-amino acids
  MISC_FEATURE (89): Xaa equals any of the twenty naturally occurring L-amino acids
  MISC_FEATURE (113): Xaa equals any of the twenty naturally occurring L-amino acids
  MISC_FEATURE (117): Xaa equals any of the twenty naturally occurring L-amino acids
  MISC_FEATURE (136): Xaa equals any of the twenty naturally occurring L-amino acids
  MISC_FEATURE (149): Xaa equals any of the twenty naturally occurring L-amino acids
  MISC_FEATURE (161): Xaa equals any of the twenty naturally occurring L-amino acids
  MISC_FEATURE (172): Xaa equals any of the twenty naturally occurring L-amino acids
  MISC_FEATURE (174): Xaa equals any of the twenty naturally occurring L-amino acids
ELRXAPEEHPXXXTEAPLNPKXNREKMTQIMFXTFNTPAMYVVIQAVLSLYASGRTTGIVMDSGDGVTHTVPIYEGYALPHAXLRLDLXGRDLTDYLMKILTERGYSFTTTVXREIXRDIKEKLCYVALDFEQEMXTVASPLLWRRATXLPDGQVITIGNXRFPVSGGACSXLXFWVWNLAGI

SEQ ID NO: 3433 - protein, 36 aa, Homo sapiens
  MISC_FEATURE (19): Xaa equals any of the twenty naturally occurring L-amino acids
  MISC_FEATURE (23): Xaa equals any of the twenty naturally occurring L-amino acids
  MISC_FEATURE (25): Xaa equals any of the twenty naturally occurring L-amino acids
  MISC_FEATURE (27): Xaa equals any of the twenty naturally occurring L-amino acids
  MISC_FEATURE (36): Xaa equals any of the twenty naturally occurring L-amino acids
LFFTTLLTFYGDDISDFQXLTYXPXAXFRKLITLDX

SEQ ID NO: 3434 - protein, 46 aa, Homo sapiens
  MISC_FEATURE (28): Xaa equals any of the twenty naturally occurring L-amino acids
  MISC_FEATURE (36): Xaa equals any of the twenty naturally occurring L-amino acids
  MISC_FEATURE (45): Xaa equals any of the twenty naturally occurring L-amino acids
TKGNKSWSSTAAAAALELVDPPGCRNSXSYVWITLXFLLFFYSMXL

SEQ ID NO: 3435 - protein, 163 aa, Homo sapiens
  MISC_FEATURE (141): Xaa equals any of the twenty naturally occurring L-amino acids
  MISC_FEATURE (154): Xaa equals any of the twenty naturally occurring L-amino acids
FAKMTNTKGKRRGTRYMFSRPFRKHGVVPLATYMRIYKKGDIVDIKGMGTVQKGMPHKCYHGKTGRVYNVTQHAVGIVVNKQVKGKILAKRINVRIEHIKHSKSRDSFLKRVKENDQKKKEAKEKGTWVQLKRQPAPPREXHFVRTNGKEPELXEPIPYEFMA

SEQ ID NO: 3436 - protein, 178 aa, Homo sapiens
TIGKAGTPAGTGPEFPGRPTRPFAAITEAGAAKMKFNPFVTSDRSKNRKRHFNAPSHIRRKIMSSPLSKELRQKYNVRSMPIRKDDEVQVVRGHYKGQQIGKVVQVYRKKYVIYIERVQREKANGTTVHVGIHPSKVVITRLKLDKDRKKILERKAKSRQVGKEKGKYKEETIEKMQE

SEQ ID NO: 3437 - protein, 163 aa, Homo sapiens
FAKMTNTKGKRRGTRYMFSRPFRKHGVVPLATYMRIYKKGDIVDIKGMGTVQKGMPHKCYHGKTGRVYNVTQHAVGIVVNKQVKGKILAKRINVRIEHIKHSKSRDSFLKRVKENDQKKKEAKEKGTWVQLKRQPAPPREAHFVRTNGKEPELLEPIPYEFMA

SEQ ID NO: 3438 - protein, 48 aa, Homo sapiens
GKLVRLQVPVRNSRVDPRVRFFEVMFLRILTLFFQAKRPAAFSPLDSF

SEQ ID NO: 3439 - protein, 107 aa, Homo sapiens
  MISC_FEATURE (3): Xaa equals any of the twenty naturally occurring L-amino acids
  MISC_FEATURE (28): Xaa equals any of the twenty naturally occurring L-amino acids
  MISC_FEATURE (31): Xaa equals any of the twenty naturally occurring L-amino acids
  MISC_FEATURE (40): Xaa equals any of the twenty naturally occurring L-amino acids
  MISC_FEATURE (45): Xaa equals any of the twenty naturally occurring L-amino acids
  MISC_FEATURE (51): Xaa equals any of the twenty naturally occurring L-amino acids
  MISC_FEATURE (55): Xaa equals any of the twenty naturally occurring L-amino acids
  MISC_FEATURE (56): Xaa equals any of the twenty naturally occurring L-amino acids
  MISC_FEATURE (67): Xaa equals any of the twenty naturally occurring L-amino acids
  MISC_FEATURE (70): Xaa equals any of the twenty naturally occurring L-amino acids
  MISC_FEATURE (80): Xaa equals any of the twenty naturally occurring L-amino acids
  MISC_FEATURE (82): Xaa equals any of the twenty naturally occurring L-amino acids
  MISC_FEATURE (95): Xaa equals any of the twenty naturally occurring L-amino acids
  MISC_FEATURE (102): Xaa equals any of the twenty naturally occurring L-amino acids
NRXTGRQRHKGSPWLLWPSGSPCPPGSXGEXGPSGASGPXGPRGXPGSAGXPGKXXLNGLPDPLGPXVLXVTLVMLVLLXPXVLLDLLVPLDLPXAGFDFSXLPQPP

SEQ ID NO: 3440 - protein, 50 aa, Homo sapiens
  MISC_FEATURE (6): Xaa equals any of the twenty naturally occurring L-amino acids
  MISC_FEATURE (7): Xaa equals any of the twenty naturally occurring L-amino acids
  MISC_FEATURE (23): Xaa equals any of the twenty naturally occurring L-amino acids
  MISC_FEATURE (33): Xaa equals any of the twenty naturally occurring L-amino acids
  MISC_FEATURE (37): Xaa equals any of the twenty naturally occurring L-amino acids
  MISC_FEATURE (40): Xaa equals any of the twenty naturally occurring L-amino acids
QWGSFXXTLLKTFIMQSCLFFSXKMFLTVLRAXFWLXPFXVLFPMKSINK

SEQ ID NO: 3441 - protein, 121 aa, Homo sapiens
  MISC_FEATURE (3): Xaa equals any of the twenty naturally occurring L-amino acids
  MISC_FEATURE (8): Xaa equals any of the twenty naturally occurring L-amino acids
  MISC_FEATURE (19): Xaa equals any of the twenty naturally occurring L-amino acids
  MISC_FEATURE (30): Xaa equals any of the twenty naturally occurring L-amino acids
  MISC_FEATURE (37): Xaa equals any of the twenty naturally occurring L-amino acids
  MISC_FEATURE (46): Xaa equals any of the twenty naturally occurring L-amino acids
  MISC_FEATURE (49): Xaa equals any of the twenty naturally occurring L-amino acids
  MISC_FEATURE (109): Xaa equals any of the twenty naturally occurring L-amino acids
  MISC_FEATURE (113): Xaa equals any of the twenty naturally occurring L-amino acids
  MISC_FEATURE (114): Xaa equals any of the twenty naturally occurring L-amino acids
  MISC_FEATURE (120): Xaa equals any of the twenty naturally occurring L-amino acids
ISXNGQTXEHALLAYTLGXKQLIVGVNKMXSTEPPYXQKRYEEIVXEVXTYIKKIGYNPDTVAFVPIFGWNGDNMLEPSANMPWFKGWKVTRKDGNASGTTLLEALDCXLPPXXQLTSPXA

SEQ ID NO: 3442 - protein, 174 aa, Homo sapiens
  MISC_FEATURE (9): Xaa equals any of the twenty naturally occurring L-amino acids
  MISC_FEATURE (10): Xaa equals any of the twenty naturally occurring L-amino acids
  MISC_FEATURE (12): Xaa equals any of the twenty naturally occurring L-amino acids
  MISC_FEATURE (14): Xaa equals any of the twenty naturally occurring L-amino acids
ACRYRSGIXXWXRXIRAACAAAMSLVIPEKFQHILRVLNTNIDGRRKIAFAITAIKGVGRRYAHVVLRKADIDLTKRAGELTEDEVERVITIMQNPRQYKIPDWFLNRQKDVKDGKYSQVLANGLDNKLREDLERLKKIRAHRGLRHFWGLRVRGQHTKTTGRRGRTVGVSKKK

SEQ ID NO: 3443 - protein, 62 aa, Homo sapiens
  MISC_FEATURE (21): Xaa equals any of the twenty naturally occurring L-amino acids
  MISC_FEATURE (26): Xaa equals any of the twenty naturally occurring L-amino acids
  MISC_FEATURE (38): Xaa equals any of the twenty naturally occurring L-amino acids
  MISC_FEATURE (42): Xaa equals any of the twenty naturally occurring L-amino acids
  MISC_FEATURE (58): Xaa equals any of the twenty naturally occurring L-amino acids
  MISC_FEATURE (62): Xaa equals any of the twenty naturally occurring L-amino acids
KMESAWRTSEGEFSKFLDNLXVEKAXWFGGYFRWTLKXYRPXLRHLEPMKQQLKGLLXITFX

SEQ ID NO: 3444 - protein, 52 aa, Homo sapiens
  MISC_FEATURE (1): Xaa equals any of the twenty naturally occurring L-amino acids
  MISC_FEATURE (5): Xaa equals any of the twenty naturally occurring L-amino acids
  MISC_FEATURE (29): Xaa equals any of the twenty naturally occurring L-amino acids
  MISC_FEATURE (30): Xaa equals any of the twenty naturally occurring L-amino acids
  MISC_FEATURE (35): Xaa equals any of the twenty naturally occurring L-amino acids
  MISC_FEATURE (44): Xaa equals any of the twenty naturally occurring L-amino acids
XLGIXESWYACRYRSGIPGSTHASARVQXXRRALXGQVLHPGAXGYLPLPAL

SEQ ID NO: 3445 - protein, 55 aa, Homo sapiens
  MISC_FEATURE (6): Xaa equals any of the twenty naturally occurring L-amino acids
  MISC_FEATURE (7): Xaa equals any of the twenty naturally occurring L-amino acids
  MISC_FEATURE (8): Xaa equals any of the twenty naturally occurring L-amino acids
  MISC_FEATURE (9): Xaa equals any of the twenty naturally occurring L-amino acids
  MISC_FEATURE (20): Xaa equals any of the twenty naturally occurring L-amino acids
  MISC_FEATURE (28): Xaa equals any of the twenty naturally occurring L-amino acids
  MISC_FEATURE (34): Xaa equals any of the twenty naturally occurring L-amino acids
  MISC_FEATURE (36): Xaa equals any of the twenty naturally occurring L-amino acids
  MISC_FEATURE (51): Xaa equals any of the twenty naturally occurring L-amino acids
KASSPXXXXQGMAESAHTWXDHGYLATXTNKNGXFXNLRIYPHGLVLLDLXSYDG

SEQ ID NO: 3446 - protein, 60 aa, Homo sapiens
  MISC_FEATURE (2): Xaa equals any of the twenty naturally occurring L-amino acids
  MISC_FEATURE (4): Xaa equals any of the twenty naturally occurring L-amino acids
  MISC_FEATURE (7): Xaa equals any of the twenty naturally occurring L-amino acids
  MISC_FEATURE (10): Xaa equals any of the twenty naturally occurring L-amino acids
  MISC_FEATURE (32): Xaa equals any of the twenty naturally occurring L-amino acids
  MISC_FEATURE (35): Xaa equals any of the twenty naturally occurring L-amino acids
  MISC_FEATURE (44): Xaa equals any of the twenty naturally occurring L-amino acids
  MISC_FEATURE (51): Xaa equals any of the twenty naturally occurring L-amino acids
  MISC_FEATURE (55): Xaa equals any of the twenty naturally occurring L-amino acids
EXTXKTXGRXPVPVRNSRVDPRVRAPCLEANXAAXQRRQQLEAXRAEADRXRQRXAELEA

SEQ ID NO: 3447 - protein, 119 aa, Homo sapiens
  MISC_FEATURE (91): Xaa equals any of the twenty naturally occurring L-amino acids
ATKPVRAPIPAVLWLQVWVDSPNGDLQLLPCGLPQTATPRRVNVGSGCGSELLYRASVLEDRAIESSLPVGHNFGSSYSQPVHSFDTVGSXSQCTMSLGYPTKSFVLSGVIPGGTLHPE

SEQ ID NO: 3448 - protein, 94 aa, Homo sapiens
GERRWLEQGARHFSYLNMCLQPPPKLPSGVFSLEFQDFVNKCLIKNPAERADLKQLMVHAFIKRSDAEEVDFAGWLCSTIGLNQPSTPTHAAGV

SEQ ID NO: 3449 - protein, 243 aa, Homo sapiens
  MISC_FEATURE (198): Xaa equals any of the twenty naturally occurring L-amino acids
  MISC_FEATURE (213): Xaa equals any of the twenty naturally occurring L-amino acids
  MISC_FEATURE (235): Xaa equals any of the twenty naturally occurring L-amino acids
EDPGVAMGRRPARCYRYCKNKPYPKSRFCRGVPDAKIRIFDLGRKKAKVDEFPLCGHMVSDEYEQLSSEALEAARICANKYMVKSCGKDGFHIRVRLHPFHVIRINKMLSCAGADRLQTGMRGAFGKPQGTVARVHIGQVIMSIRTKLQNKEHVIEALRRAKFKFPGRQKIHISKKWGFTKFNADEFEDMVAEKAAHXRWLVGSKYIPKSWPXWTKWPGPLHFMKAFQMGLAPLXKYFTQLKF

SEQ ID NO: 3450 - protein, 221 aa, Homo sapiens
  MISC_FEATURE (16): Xaa equals any of the twenty naturally occurring L-amino acids
  MISC_FEATURE (22): Xaa equals any of the twenty naturally occurring L-amino acids
  MISC_FEATURE (48): Xaa equals any of the twenty naturally occurring L-amino acids
  MISC_FEATURE (66): Xaa equals any of the twenty naturally occurring L-amino acids
  MISC_FEATURE (116): Xaa equals any of the twenty naturally occurring L-amino acids
  MISC_FEATURE (123): Xaa equals any of the twenty naturally occurring L-amino acids
  MISC_FEATURE (137): Xaa equals any of the twenty naturally occurring L-amino acids
  MISC_FEATURE (141): Xaa equals any of the twenty naturally occurring L-amino acids
  MISC_FEATURE (159): Xaa equals any of the twenty naturally occurring L-amino acids
  MISC_FEATURE (166): Xaa equals any of the twenty naturally occurring L-amino acids
  MISC_FEATURE (169): Xaa equals any of the twenty naturally occurring L-amino acids
  MISC_FEATURE (171): Xaa equals any of the twenty naturally occurring L-amino acids
  MISC_FEATURE (172): Xaa equals any of the twenty naturally occurring L-amino acids
  MISC_FEATURE (173): Xaa equals any of the twenty naturally occurring L-amino acids
  MISC_FEATURE (176): Xaa equals any of the twenty naturally occurring L-amino acids
  MISC_FEATURE (177): Xaa equals any of the twenty naturally occurring L-amino acids
  MISC_FEATURE (178): Xaa equals any of the twenty naturally occurring L-amino acids
  MISC_FEATURE (179): Xaa equals any of the twenty naturally occurring L-amino acids
  MISC_FEATURE (185): Xaa equals any of the twenty naturally occurring L-amino acids
  MISC_FEATURE (196): Xaa equals any of the twenty naturally occurring L-amino acids
  MISC_FEATURE (198): Xaa equals any of the twenty naturally occurring L-amino acids
  MISC_FEATURE (199): Xaa equals any of the twenty naturally occurring L-amino acids
  MISC_FEATURE (202): Xaa equals any of the twenty naturally occurring L-amino acids
  MISC_FEATURE (203): Xaa equals any of the twenty naturally occurring L-amino acids
  MISC_FEATURE (209): Xaa equals any of the twenty naturally occurring L-amino acids
  MISC_FEATURE (215): Xaa equals any of the twenty naturally occurring L-amino acids
LGQRFGRFLGLTERDXELLYPXKEKVFYSLMRESGYMHIQCTKPDTVXSALNDSPVGLAAYILEKXSTWTNTEFRYLEDGGLERKISLDDLLTNVMLYWTTGTIISSQRFYKENLXQGWMTQXHERMKVYVPTGFSXFPFXLLHTPEKWVRFKYPKLIXYSYMVRXGHXAXXXEPXXXXQDIRKXLSVLEPVMTHXSXXGCXXPPKCPXAFLWGXNPFSEE

SEQ ID NO: 3451 - protein, 214 aa, Homo sapiens
  MISC_FEATURE (174): Xaa equals any of the twenty naturally occurring L-amino acids
  MISC_FEATURE (212): Xaa equals any of the twenty naturally occurring L-amino acids
ARKAMYKRKYSAAKSKVEKKKKEKVLATVTKPVGGDKNGGTRVVKLRKMPRYYPTEDVPRKLLSHGKKPFSQHVRKLRASITPGTILIILTGRHRGKRVVFLKQLASGLLLVTGPLVLNRVPLRRTHQKFVIATSTKIDISNVKIPKHLTDAYFKKKKLRKPRHQEGEIFDTEXEKYEITEQRKIDQKAVDSQILPKIKAIPQLQGLPCDLXLL

SEQ ID NO: 3452 - protein, 93 aa, Homo sapiens
  MISC_FEATURE (45): Xaa equals any of the twenty naturally occurring L-amino acids
  MISC_FEATURE (51): Xaa equals any of the twenty naturally occurring L-amino acids
PCPSPKLPPSGHTELSLLDSPEERGSSMGWVRDVLARSRDCVVCXLKCSSXWPKVLTLPQADECLESSRASASHLLSFPGILDLMTIKMLLWF

SEQ ID NO: 3453 - protein, 95 aa, Homo sapiens
  MISC_FEATURE (93): Xaa equals any of the twenty naturally occurring L-amino acids
SVFIASRKLVALQLRSIFIKYKSKPFCEKLLSWVKSSGCARVIVLSSSHSYQRNDLQLRSTPFRYLLTPSMQKSVQNKIKSLTGKKWKKSRAXLK

SEQ ID NO: 3454 - protein, 146 aa, Homo sapiens
GGQVQVVQVRKIFVGTKGIPHLVTHDARTIRYPDPLIKVNDTIQIDLETGKITDFIKFDTGNLCMVTGGANLGRIGVITNRERHPGSFDVVHVKDANGNSFATRLSNIFVIGKGNKPWISLPRGKGIRLTIAEERDKRLAAKQSSG

SEQ ID NO: 3455 - protein, 84 aa, Homo sapiens
LDNNKLTRVPGGLAEHKYIQVVYLHNNNISVVGSSDFCPPGHNTKKASYSGVSLFSNPVQYWEIQPSTFRCVYVRSAIQLGNYK

SEQ ID NO: 3456 - protein, 128 aa, Homo sapiens
EEEKIRVDILENQTMDNHMQLGMICYNPEFEKLKPKYLEELPEKLKLYSEFLGKRPWFAGNKITFVDFLVYDVLDLHRIFEPNCLDAFPNLKDFISRFEGLEKISAYMKSSRFLPRPVFSKMAVWGNK

SEQ ID NO: 3457 - protein, 74 aa, Homo sapiens
  MISC_FEATURE (12): Xaa equals any of the twenty naturally occurring L-amino acids
  MISC_FEATURE (18): Xaa equals any of the twenty naturally occurring L-amino acids
  MISC_FEATURE (20): Xaa equals any of the twenty naturally occurring L-amino acids
  MISC_FEATURE (21): Xaa equals any of the twenty naturally occurring L-amino acids
  MISC_FEATURE (23): Xaa equals any of the twenty naturally occurring L-amino acids
  MISC_FEATURE (28): Xaa equals any of the twenty naturally occurring L-amino acids
  MISC_FEATURE (34): Xaa equals any of the twenty naturally occurring L-amino acids
  MISC_FEATURE (36): Xaa equals any of the twenty naturally occurring L-amino acids
  MISC_FEATURE (38): Xaa equals any of the twenty naturally occurring L-amino acids
  MISC_FEATURE (39): Xaa equals any of the twenty naturally occurring L-amino acids
  MISC_FEATURE (40): Xaa equals any of the twenty naturally occurring L-amino acids
  MISC_FEATURE (42): Xaa equals any of the twenty naturally occurring L-amino acids
  MISC_FEATURE (43): Xaa equals any of the twenty naturally occurring L-amino acids
  MISC_FEATURE (52): Xaa equals any of the twenty naturally occurring L-amino acids
  MISC_FEATURE (60): Xaa equals any of the twenty naturally occurring L-amino acids
  MISC_FEATURE (61): Xaa equals any of the twenty naturally occurring L-amino acids
  MISC_FEATURE (62): Xaa equals any of the twenty naturally occurring L-amino acids
  MISC_FEATURE (63): Xaa equals any of the twenty naturally occurring L-amino acids
  MISC_FEATURE (66): Xaa equals any of the twenty naturally occurring L-amino acids
  MISC_FEATURE (67): Xaa equals any of the twenty naturally occurring L-amino acids
  MISC_FEATURE (72): Xaa equals any of the twenty naturally occurring L-amino acids
PARKAQSILHSXCFPVLXLXXRXMGVPXKTFAVXPXFXXXFXXKFDRLNYCXHSLFLGLXXXXGNXXRADAXLF

SEQ ID NO: 3458 - protein, 62 aa, Homo sapiens
LTPSSLPPSIHFWSTLSPIAPRSPAKLSFQFPSSGSAQVHIPSISVDGLSTPVVLSPGPQKP

SEQ ID NO: 3459 - protein, 146 aa, Homo sapiens
VAAAEGAAAMSAHLQWMVVRNCSSFLIKRNKQTYSTEPNNLKARNSFRYNGLIHRKTVGVEPAADGKGVVVVIKRRSGQRKPATSYVRTTINKNARATLSSIRHMIRKNKYRPDLRMAAIRRASAILRSQKPVMVKRKRTRPTKSS

SEQ ID NO: 3460 - protein, 73 aa, Homo sapiens
  MISC_FEATURE (11): Xaa equals any of the twenty naturally occurring L-amino acids
  MISC_FEATURE (19): Xaa equals any of the twenty naturally occurring L-amino acids
  MISC_FEATURE (20): Xaa equals any of the twenty naturally occurring L-amino acids
  MISC_FEATURE (22): Xaa equals any of the twenty naturally occurring L-amino acids
  MISC_FEATURE (29): Xaa equals any of the twenty naturally occurring L-amino acids
  MISC_FEATURE (37): Xaa equals any of the twenty naturally occurring L-amino acids
  MISC_FEATURE (53): Xaa equals any of the twenty naturally occurring L-amino acids
  MISC_FEATURE (68): Xaa equals any of the twenty naturally occurring L-amino acids
  MISC_FEATURE (71): Xaa equals any of the twenty naturally occurring L-amino acids
LRLLTMEQIMXGPEEDPFXXLXEYSHLTXIIYSEPLXWEFKDYWQRLLMVNKXMQNNSHMGKNFKMGXFGXAF

SEQ ID NO: 3461 - protein, 202 aa, Homo sapiens
RKEGTGSTATSSSSTAGAAGKGKGKGGSGDSAVKQVQIDGLVVLKIIKHYQEEGQGTEVVQGVLLGLVVEDRLEITNCFPFPQHTEDDADFDEVQYQMEMMRSLRHVNIDHLHVGWYQSTYYGSFVTRALLDSQFSYQHAIEESVVLIYDPIKTAQGSLSLKAYRLTPKLMEVCKEKDFSPEALKKANITFEYMFEEVPDCN

SEQ ID NO: 3462 - protein, 132 aa, Homo sapiens
GAPEVKSVPLLPWPPRSAPKKGLRITVKLTIQNRQAQIEVVPSASALIIKALKEPPRDRKKQKNIKHSGNITFDEIVNIARQMRHRSLARELSGTIKEILGTAQSVGCNVDGRHPHDIIDDINSGAVECPAS

SEQ ID NO: 3463 - protein, 131 aa, Homo sapiens
  MISC_FEATURE (21): Xaa equals any of the twenty naturally occurring L-amino acids
  MISC_FEATURE (23): Xaa equals any of the twenty naturally occurring L-amino acids
  MISC_FEATURE (24): Xaa equals any of the twenty naturally occurring L-amino acids
  MISC_FEATURE (25): Xaa equals any of the twenty naturally occurring L-amino acids
  MISC_FEATURE (27): Xaa equals any of the twenty naturally occurring L-amino acids
  MISC_FEATURE (30): Xaa equals any of the twenty naturally occurring L-amino acids
  MISC_FEATURE (32): Xaa equals any of the twenty naturally occurring L-amino acids
  MISC_FEATURE (37): Xaa equals any of the twenty naturally occurring L-amino acids
  MISC_FEATURE (38): Xaa equals any of the twenty naturally occurring L-amino acids
  MISC_FEATURE (40): Xaa equals any of the twenty naturally occurring L-amino acids
  MISC_FEATURE (43): Xaa equals any of the twenty naturally occurring L-amino acids
  MISC_FEATURE (49): Xaa equals any of the twenty naturally occurring L-amino acids
  MISC_FEATURE (51): Xaa equals any of the twenty naturally occurring L-amino acids
  MISC_FEATURE (52): Xaa equals any of the twenty naturally occurring L-amino acids
  MISC_FEATURE (53): Xaa equals any of the twenty naturally occurring L-amino acids
  MISC_FEATURE (59): Xaa equals any of the twenty naturally occurring L-amino acids
  MISC_FEATURE (71): Xaa equals any of the twenty naturally occurring L-amino acids
  MISC_FEATURE (73): Xaa equals any of the twenty naturally occurring L-amino acids
  MISC_FEATURE (76): Xaa equals any of the twenty naturally occurring L-amino acids
  MISC_FEATURE (85): Xaa equals any of the twenty naturally occurring L-amino acids
  MISC_FEATURE (102): Xaa equals any of the twenty naturally occurring L-amino acids
  MISC_FEATURE (119): Xaa equals any of the twenty naturally occurring L-amino acids
LVKDENSTQRRLFGKQTRTLXLXXXGXGGXYXSNQKXXAXALXDWTGKXFXXXTLKVFXALDGHQLAGICXDXSYXGALIATGFXDRNVKIWGLDFGDCHKXLFAHDDSVMYLQFVPKXHLFFTAGKDHID

SEQ ID NO: 3464 - protein, 64 aa, Homo sapiens
  MISC_FEATURE (4): Xaa equals any of the twenty naturally occurring L-amino acids
EGNXKFTYTVLEDGCTKHTGEWSKTVFEYRTRKAVRLPIVDIAPYDIGGPDQEFGVDVGPVCFL

SEQ ID NO: 3465 - protein, 208 aa, Homo sapiens
  MISC_FEATURE (24): Xaa equals any of the twenty naturally occurring L-amino acids
  MISC_FEATURE (25): Xaa equals any of the twenty naturally occurring L-amino acids
GVMSHRKFSAPRHGSLGFLPRKRXXRHRGKVKSFPKDDPSKPVHLTAFLGYKAGMTHIVREVDRPGSKVNKKEVVEAVTIVETPPMVVVGIVGYVETPRGLRTFKTVFAEHISDECKRRFYKNWHKSKKKAFTKYCKKWQDEDGKKQLEKDFSSMKKYCQVIRVIAHTQMRLLPLRQKKAHLMEIQVNGGTVAEKLDWPARGLSSRYL

SEQ ID NO: 3466 - protein, 151 aa, Homo sapiens
  MISC_FEATURE (9): Xaa equals any of the twenty naturally occurring L-amino acids
  MISC_FEATURE (60): Xaa equals any of the twenty naturally occurring L-amino acids
  MISC_FEATURE (78): Xaa equals any of the twenty naturally occurring L-amino acids
  MISC_FEATURE (96): Xaa equals any of the twenty naturally occurring L-amino acids
  MISC_FEATURE (104): Xaa equals any of the twenty naturally occurring L-amino acids
  MISC_FEATURE (107): Xaa equals any of the twenty naturally occurring L-amino acids
  MISC_FEATURE (112): Xaa equals any of the twenty naturally occurring L-amino acids
  MISC_FEATURE (127): Xaa equals any of the twenty naturally occurring L-amino acids
  MISC_FEATURE (134): Xaa equals any of the twenty naturally occurring L-amino acids
  MISC_FEATURE (136): Xaa equals any of the twenty naturally occurring L-amino acids
  MISC_FEATURE (145): Xaa equals any of the twenty naturally occurring L-amino acids
  MISC_FEATURE (148): Xaa equals any of the twenty naturally occurring L-amino acids
VYRYVAQAXDKPRYTLHYKTDAPLNIRSIFYVPDMKPSMFDVSRELGSSVALYSRKVLIXTKATDILPKWLRFIRGVXDSEDIPLNLSRELLQESXLIMKLRDXLQXRLIKXFIDQSKKDAEKYAKXFEDYGLXCXKGIVTRHPXRRXRRT

SEQ ID NO: 3467 - protein, 193 aa, Homo sapiens
  MISC_FEATURE (129): Xaa equals any of the twenty naturally occurring L-amino acids
  MISC_FEATURE (131): Xaa equals any of the twenty naturally occurring L-amino acids
  MISC_FEATURE (152): Xaa equals any of the twenty naturally occurring L-amino acids
  MISC_FEATURE (159): Xaa equals any of the twenty naturally occurring L-amino acids
  MISC_FEATURE (161): Xaa equals any of the twenty naturally occurring L-amino acids
  MISC_FEATURE (169): Xaa equals any of the twenty naturally occurring L-amino acids
  MISC_FEATURE (182): Xaa equals any of the twenty naturally occurring L-amino acids
PKGKKAKGKKVAPAPAVVKKQEAKKVVNPLFEKRPKNFGIGQDIQPKRDLTRFVKWPRYIRLQRQRAILYKRLKVPPAINQFTQALDRQTATQLLKLAHKYRPETKQEKEAETVGPGREERLLAKGGTXPXKEDPPCPFEPGSLTTRHPPLXGRTKEKXQXWVGGIGTXTLGIPQFEALGLXLSFGLGPLGGP

SEQ ID NO: 3468 - protein, 86 aa, Homo sapiens
  MISC_FEATURE (7): Xaa equals any of the twenty naturally occurring L-amino acids
EHSCRDXLPLKAKMGKEKTHINIVVIGHVDSGKSTTTGHLIYKCGGIDKRTIEKFEKEAAEMGKGSFKYAWVLDKLKAEREPWYHH

SEQ ID NO: 3469 - protein, 68 aa, Homo sapiens
  MISC_FEATURE (11): Xaa equals any of the twenty naturally occurring L-amino acids
  MISC_FEATURE (52): Xaa equals any of the twenty naturally occurring L-amino acids
MRSTEGPGGIXNFLQGIFLYIILGTFFFTFFRKPKDFKIYLWRTIHILKWSXIMAVVYLLYYLNYWQL

SEQ ID NO: 3470 - protein, 86 aa, Homo sapiens
  MISC_FEATURE (63): Xaa equals any of the twenty naturally occurring L-amino acids
  MISC_FEATURE (66): Xaa equals any of the twenty naturally occurring L-amino acids
  MISC_FEATURE (72): Xaa equals any of the twenty naturally occurring L-amino acids
  MISC_FEATURE (73): Xaa equals any of the twenty naturally occurring L-amino acids
  MISC_FEATURE (76): Xaa equals any of the twenty naturally occurring L-amino acids
  MISC_FEATURE (78): Xaa equals any of the twenty naturally occurring L-amino acids
  MISC_FEATURE (79): Xaa equals any of the twenty naturally occurring L-amino acids
  MISC_FEATURE (81): Xaa equals any of the twenty naturally occurring L-amino acids
  MISC_FEATURE (82): Xaa equals any of the twenty naturally occurring L-amino acids
  MISC_FEATURE (84): Xaa equals any of the twenty naturally occurring L-amino acids
  MISC_FEATURE (86): Xaa equals any of the twenty naturally occurring L-amino acids
RRRRLPSVAIMIIYRDLISHDEMFSDIYKIREIADGLCLEVEGKMVSRTEGNIDDSLIGGNAXAEXPEGQSXXSTXIXXGXXGXDX

SEQ ID NO: 3471 - protein, 105 aa, Homo sapiens
  MISC_FEATURE (43): Xaa equals any of the twenty naturally occurring L-amino acids
  MISC_FEATURE (53): Xaa equals any of the twenty naturally occurring L-amino acids
  MISC_FEATURE (56): Xaa equals any of the twenty naturally occurring L-amino acids
  MISC_FEATURE (65): Xaa equals any of the twenty naturally occurring L-amino acids
  MISC_FEATURE (67): Xaa equals any of the twenty naturally occurring L-amino acids
  MISC_FEATURE (79): Xaa equals any of the twenty naturally occurring L-amino acids
  MISC_FEATURE (80): Xaa equals any of the twenty naturally occurring L-amino acids
  MISC_FEATURE (82): Xaa equals any of the twenty naturally occurring L-amino acids
  MISC_FEATURE (93): Xaa equals any of the twenty naturally occurring L-amino acids
AFVSISNILSWFSNGVYSLVISQTLASSPEILLDGERESGEGXRGKGDPSFPXARXTPISPVPRXAXPEGFLFLPANCXXRXPHNGIGTSLSXTRNSFRKFPSLA

SEQ ID NO: 3472 - protein, 76 aa, Homo sapiens
  MISC_FEATURE (19): Xaa equals any of the twenty naturally occurring L-amino acids
  MISC_FEATURE (64): Xaa equals any of the twenty naturally occurring L-amino acids
  MISC_FEATURE (66): Xaa equals any of the twenty naturally occurring L-amino acids
  MISC_FEATURE (73): Xaa equals any of the twenty naturally occurring L-amino acids
SVICIAGNTKSYTVYALKXWFLKVVPKGIMVFQLVISKVTIHFHHKYTLGLLAFRLYEKNRVLXKXLIREHYXWHG

SEQ ID NO: 3473 - protein, 151 aa, Homo sapiens
AKLQAQVRIGGKGTARRKKKVVHRTATADDKKLQFSLKKLGVNNISGIEEVNMFTNQGTVIHFNNPKVQASLAANTFTITGHAETKQLTEMLPSILNQLGADSLTSLRRLAEALPKQSVDGKAPLATGEDDDDEVPDLVENFDEASKNEAN

SEQ ID NO: 3474 - protein, 130 aa, Homo sapiens
  MISC_FEATURE (114): Xaa equals any of the twenty naturally occurring L-amino acids
  MISC_FEATURE (126): Xaa equals any of the twenty naturally occurring L-amino acids
  MISC_FEATURE (130): Xaa equals any of the twenty naturally occurring L-amino acids
GAGMGLAGVCALRRSAGYILVGGAGGQSAAAAARRCSEGEWASGGVRSFSRAAAAMAPIKVGDAIPAVEVFEGEPGNKVNLAELFKGKKGVLFGVPGAFTLGCSKTHLPGFVEXAEALKAKGVQVXPAEX

SEQ ID NO: 3475 - protein, 118 aa, Homo sapiens
  MISC_FEATURE (118): Xaa equals any of the twenty naturally occurring L-amino acids
APVAFSGRPGPRLPPAQQSASLPTRGNRPRMQHRGFLLLTLLALLALTSAVAKKKDKVKKGGPGSECAEWAWGPCTPSSKDCGVGFREGTCGAQTQRIRCRVPCNWKKEFGADCKYQX

SEQ ID NO: 3476 - protein, 146 aa, Homo sapiens
  MISC_FEATURE (1): Xaa equals any of the twenty naturally occurring L-amino acids
  MISC_FEATURE (19): Xaa equals any of the twenty naturally occurring L-amino acids
  MISC_FEATURE (46): Xaa equals any of the twenty naturally occurring L-amino acids
  MISC_FEATURE (58): Xaa equals any of the twenty naturally occurring L-amino acids
  MISC_FEATURE (74): Xaa equals any of the twenty naturally occurring L-amino acids
  MISC_FEATURE (100): Xaa equals any of the twenty naturally occurring L-amino acids
  MISC_FEATURE (121): Xaa equals any of the twenty naturally occurring L-amino acids
  MISC_FEATURE (135): Xaa equals any of the twenty naturally occurring L-amino acids
  MISC_FEATURE (136): Xaa equals any of the twenty naturally occurring L-amino acids
  MISC_FEATURE (143): Xaa equals any of the twenty naturally occurring L-amino acids
XTSRVTGGPLFQGHRCILXCAEAVLSRSVFPDQRGSTWEACLKHAXLWCCSGMDSMHXPLFDTFSHCGWRPIFXIPCGMRILSCPQTDLTFVPELSRAVXFVTELPVPELGLLEHDAGGCXRPGLCSLGRRAATXXGKAWPQXVPL

SEQ ID NO: 3477 - protein, 52 aa, Homo sapiens
EPCCGRAKGVKGRLEAQRAREVGYISLSSQGGKKECKSGLNVPNGEDPRARG

SEQ ID NO: 3478 - protein, 95 aa, Homo sapiens
  MISC_FEATURE (49): Xaa equals any of the twenty naturally occurring L-amino acids
  MISC_FEATURE (54): Xaa equals any of the twenty naturally occurring L-amino acids
  MISC_FEATURE (77): Xaa equals any of the twenty naturally occurring L-amino acids
  MISC_FEATURE (81): Xaa equals any of the twenty naturally occurring L-amino acids
  MISC_FEATURE (87): Xaa equals any of the twenty naturally occurring L-amino acids
  MISC_FEATURE (92): Xaa equals any of the twenty naturally occurring L-amino acids
SLVLTGFPKVKMLLPTVWGRLNFPRLPSSASHSIPRQGKACTKIMQFKXSKSLXNQLNGFGGKNILRFTDNLRVDGXDEMXHLFTLXNRLVXGHW

SEQ ID NO: 3479 - protein, 94 aa, Homo sapiens
VQDGIELQAGDEVEFSVILNQRTGKCSACNVWRVCEGPKAVAAPRPDRLVNRLKNITLDDASAPRLMVLRQPRGPDNSMGFGAERKIRQAGVID

SEQ ID NO: 3480 - protein, 66 aa, Homo sapiens
  MISC_FEATURE (1): Xaa equals any of the twenty naturally occurring L-amino acids
XKVPAINVNDSVTKSKFDNLYGCRESLIDGIKRATDVMIAGKVAVVAGYGDVGKGCAQAPPLLPKS

SEQ ID NO: 3481 - protein, 163 aa, Homo sapiens
  MISC_FEATURE (136): Xaa equals any of the twenty naturally occurring L-amino acids
  MISC_FEATURE (138): Xaa equals any of the twenty naturally occurring L-amino acids
  MISC_FEATURE (141): Xaa equals any of the twenty naturally occurring L-amino acids
  MISC_FEATURE (148): Xaa equals any of the twenty naturally occurring L-amino acids
CGGAATKMQIFVKTLTGKTITLEVEPSDTIENVKAKIQDKEGIPPDQQRLIFAGKQLEDGRTLSDYNIQKESTLHLVLRLRGGAKKRKKKSYTTPKKNKHKRKKVKLAVLKYYKVDENGKISRLRRECPSDECGVXVXMAXHFDRHYXGKWCLTYWFNKPEDQ

SEQ ID NO: 3482 - protein, 184 aa, Homo sapiens
  MISC_FEATURE (27): Xaa equals any of the twenty naturally occurring L-amino acids
  MISC_FEATURE (77): Xaa equals any of the twenty naturally occurring L-amino acids
  MISC_FEATURE (88): Xaa equals any of the twenty naturally occurring L-amino acids
  MISC_FEATURE (89): Xaa equals any of the twenty naturally occurring L-amino acids
  MISC_FEATURE (94): Xaa equals any of the twenty naturally occurring L-amino acids
  MISC_FEATURE (111): Xaa equals any of the twenty naturally occurring L-amino acids
  MISC_FEATURE (145): Xaa equals any of the twenty naturally occurring L-amino acids
  MISC_FEATURE (156): Xaa equals any of the twenty naturally occurring L-amino acids
  MISC_FEATURE (166): Xaa equals any of the twenty naturally occurring L-amino acids
  MISC_FEATURE (179): Xaa equals any of the twenty naturally occurring L-amino acids
APPNMSTGSLSDVEDLQEVEMLECDGXKMDSNKEFVTSNESTEESSNCENGSPQKGRGGLGKRRKAPTKKSPLSGVXQEGKQVQRNAXXARERXRMRVLSKAFSRLKTTLXWVPPDTKLSKLDTLRLASSYIAHLRQILANDQYXNGYITRATDVXLYGGGKPESXLKEVVDREPVMWXHRVLT

SEQ ID NO: 3483 - protein, 87 aa, Homo sapiens
ELDHYAIIKFPLTTESAMKKIEDNNTLVFIVDVKANKHQIKQAVKKLYDIDVAKVNTLIRPDGEKKAYVRLAPDYDALDVANKIGII

SEQ ID NO: 3484 - protein, 128 aa, Homo sapiens
  MISC_FEATURE (19): Xaa equals any of the twenty naturally occurring L-amino acids
  MISC_FEATURE (32): Xaa equals any of the twenty naturally occurring L-amino acids
  MISC_FEATURE (35): Xaa equals any of the twenty naturally occurring L-amino acids
  MISC_FEATURE (46): Xaa equals any of the twenty naturally occurring L-amino acids
  MISC_FEATURE (52): Xaa equals any of the twenty naturally occurring L-amino acids
  MISC_FEATURE (72): Xaa equals any of the twenty naturally occurring L-amino acids
  MISC_FEATURE (110): Xaa equals any of the twenty naturally occurring L-amino acids
LKTPSAAYLWVGTGASEAXKTGAQELLRVLRXQPXQVAEGSEPDGXWEALGXKAAYRTSPRLKDKKMDAHPXRLFACSNKIGRFEIEEVPGELMQEDLATDDVMLLDTWXQVFVWVGKDSQEEEQTEP

SEQ ID NO: 3485 - protein, 154 aa, Homo sapiens
FWEEGCDVCTCTDMEDAVMGLRVAQCSQKPCEDSCRSGFTYVLHEGECCGRCLPSACEVVTGSPRGDSQSSWKSVGSQWASPENPCLINECVRVKEEVFIQQRNVSCPQLEVPVCPSGFQLSCKTSACCPSCRCGKSAWRPACSMALSLGPGRL

SEQ ID NO: 3486 - protein, 92 aa, Homo sapiens
EKTEPGTTSSPHIPPSLDLILERGSLFTDCVWTLSRLLPLALALCCQPSGGGLEPGVSAPDSSGFQSSCLRTQTCESLLHAGVSPGQLVTPQ

SEQ ID NO: 3487 - protein, 142 aa, Homo sapiens
RHGKYMACCLLYRGDVVPKDVNAAIATIKTKRTIQFVDWCPTGFKVGINYQPPTVVPGGDLAKVQRAVCMLSNTTAVAEAWARLDHKFDLMYAKRAFVHWYVGEGMEEGEFSEAREDMAALEKDYEEVGADSADGEDEGEEY

SEQ ID NO: 3488 - protein, 54 aa, Homo sapiens
IISARLIKVEKPLYGVEVFVGETAHFEIELSEPDVHGQWKLKGQPLTASPVSQD

SEQ ID NO: 3489 - protein, 97 aa, Homo sapiens
AGSCVIGTIKSSFFLLPTKTGETLGFPVYASREKRGIVIGNWKDNEWRPERIIQYYGPATWAQDGSWGYRTPIYMLNRIIRLQAILEIITNETGRAL

SEQ ID NO: 3490 - protein, 170 aa, Homo sapiens
IRWKSFSFVRVISLGLVVFLVSALSLGPFLALNQLPQVFSRLFPFKRGLCHAYWAPNFWALYNALDKVLSVIGPRGFLRCLTLCALSSFMFGWHVHEKAILLAILPMSLLSVGKAGDASIFLILTTTGHYSLFPLLFTAPELPIKILLMLLFTIYSISSLKTLFRKEKPL

SEQ ID NO: 3491 - protein, 89 aa, Homo sapiens
  MISC_FEATURE (80): Xaa equals any of the twenty naturally occurring L-amino acids
  MISC_FEATURE (85): Xaa equals any of the twenty naturally occurring L-amino acids
  MISC_FEATURE (87): Xaa equals any of the twenty naturally occurring L-amino acids
  MISC_FEATURE (88): Xaa equals any of the twenty naturally occurring L-amino acids
GLSGGSRASVAAMVLLESEQFLTELTRLFQKCRTSGSVYITLKKYDGRTKPIPKKGTVEGFEPADNKCLLRATDGKKKIXTVVSXKXXE

SEQ ID NO: 3492 - protein, 28 aa, Homo sapiens
  MISC_FEATURE (23): Xaa equals any of the twenty naturally occurring L-amino acids
KLIIDRERHLADLLPLVFLFFVXFVFLN

SEQ ID NO: 3493 - protein, 170 aa, Homo sapiens
RRRSIVKVSLHPAVMSKSESPKEPEQLRKLFIGGLSFETTDESLRSHFEQWGTLTDCVVMRDPNTKRSRGFGFVTYATVEEVDAAMNARPHKVDGRVVEPKRAVSREDSQRPGAHLTVKKIFVGGIKEDTEEHHLRDYFEQYGKIEVIEIMTDRGSGKKRGFAFVTFDDH

SEQ ID NO: 3494 - protein, 77 aa, Homo sapiens
GFYFYPKGAILARLFLISNHWFNNKGNLFNQLTEISWLMKVKSPVVLALAAGEQFHPVSSASLCVGICYIPGHHLRG

SEQ ID NO: 3495 - protein, 110 aa, Homo sapiens
THRLVRQGCHGNRQAPLKVGQYPGPIHSLLRGLRPRMGTSEKSSKEKKPHSVREDMSGFQEKGGSVLQSGGGTRDRGFTSQQPGPCTVCVFKTTKVQELHCTVSPLFIFS

SEQ ID NO: 3496 - protein, 66 aa, Homo sapiens
CLAVNQYFEVIHRCLSSPQTFLNKKQDLFSLDGATYAHHNRDFTWKPGSVRTDFLPNICLWAVSSD

SEQ ID NO: 3497 - protein, 139 aa, Homo sapiens
TEKVLSTSTGLTKTVYNPAALKAAQKTLLVSTSAVDNNEAQKKKQEALKLQQDVRKRKQEILEKHIETQKMLISKLEKNKTMKSEDKAEIMKTLEVLTKNITKLKDEVKAASPGRCLPKSIKTKTQMQKELLDTELDLY

SEQ ID NO: 3498 - protein, 123 aa, Homo sapiens
EGTQMTPQHMEELAEQEIARLVLTDEEKSLLEKEGLILPETLPLTKTEEQILKRVRRKIRNKRSAQESRRKKKVYVGGLESRVLKYTAQNMELQNKVQLLEEQNLSLLDQLRKLQAMVIEISN

SEQ ID NO: 3499 - protein, 76 aa, Homo sapiens
  MISC_FEATURE (69): Xaa equals any of the twenty naturally occurring L-amino acids
  MISC_FEATURE (72): Xaa equals any of the twenty naturally occurring L-amino acids
  MISC_FEATURE (75): Xaa equals any of the twenty naturally occurring L-amino acids
  MISC_FEATURE (76): Xaa equals any of the twenty naturally occurring L-amino acids
CLYVTFPSSDPEPWGTGKRGWPLALLCLQNKLLKSNRISHVFTHVAQVCYVILPVLKRRLIKQLYLLKXKKXKIXX

SEQ ID NO: 3500 - protein, 35 aa, Homo sapiens
MHFVWYCIYSIKYLISAKCELDPVAKPQQAILGRV

SEQ ID NO: 3501 - protein, 120 aa, Homo sapiens
KAQEGEAPLQPQPCPCQRNWQVFPICHVFRKAMYKRKYSAAKSKVEKKKKEKVLATVTKPVGGDKNGGTRVVKLRKMPRYYPTEDVPRKLLSHGKKPFSQHVRKLRASITPGTILIILTG

SEQ ID NO: 3502 - protein, 169 aa, Homo sapiens
ASGAAAYGADMAKSKNHTTHNQSRKWHRNGIKKPRSQRYESLKGVDPKFLRNMRFAKKHNKKGLKKMQANNAKAMSARAEAIKALVKPKEVKPKIPKGVSRKLDRLAYIAHPKLGKRARARIAKGLRLCRPKAKAKAKAKAKDQTKAQAAAPASVPAQAPKRTQAPTKA

SEQ ID NO: 3503 - protein, 162 aa, Homo sapiens
AYHEQLSVAEITNACFEPANQMVKCDPRHGKYMACCLLYRGDVVPKDVNAAIATIKTKRSIQFVDWCPTGFKVGINYQPPTVVPGGDLAKVQRAVCMLSNTTAIAEAWARLDHKFDLMYAKRAFVHWYVGEGMEEGEFSEAREDMAALEKDYEEVGVDSVEG

SEQ ID NO: 3504 - protein, 62 aa, Homo sapiens
FLMIPLPVSICLGYTRVYHKCFDDILLSFHSAASPRPLLLWQEMWRAVAKFSRHCFLASSFH

SEQ ID NO: 3505 - protein, 198 aa, Homo sapiens
  MISC_FEATURE (175): Xaa equals any of the twenty naturally occurring L-amino acids
  MISC_FEATURE (177): Xaa equals any of the twenty naturally occurring L-amino acids
  MISC_FEATURE (185): Xaa equals any of the twenty naturally occurring L-amino acids
  MISC_FEATURE (191): Xaa equals any of the twenty naturally occurring L-amino acids
  MISC_FEATURE (195): Xaa equals any of the twenty naturally occurring L-amino acids
AAHEAEQLRAYLDGTCVEWLRRYLENGKETLQRTDPPKTHMTHHPISDHEATLRCWALGFYPAEITLTWQRDGEDQTQDTELVETRPAGDGTFQKWRLWWCLLERSRDTPAMCSMRVCQAPHPEMGAVFPAHHPHRGHHCWPGSPWSCDHWSCGRCRDVEEEELPNHLSWFKKVXLXGFISAQLXGALSLXLLPXLLK

SEQ ID NO: 3506 - protein, 70 aa, Homo sapiens
GKTEGDAKGDKAKVKDESQRRSARLSAKPAPPKPEPKPKKAPAKKGEKVPKGKKRKADAGKEREGAGDPK

SEQ ID NO: 3507 - protein, 166 aa, Homo sapiens
  MISC_FEATURE (33): Xaa equals any of the twenty naturally occurring L-amino acids
  MISC_FEATURE (54): Xaa equals any of the twenty naturally occurring L-amino acids
  MISC_FEATURE (61): Xaa equals any of the twenty naturally occurring L-amino acids
  MISC_FEATURE (64): Xaa equals any of the twenty naturally occurring L-amino acids
  MISC_FEATURE (78): Xaa equals any of the twenty naturally occurring L-amino acids
  MISC_FEATURE (82): Xaa equals any of the twenty naturally occurring L-amino acids
  MISC_FEATURE (84): Xaa equals any of the twenty naturally occurring L-amino acids
  MISC_FEATURE (88): Xaa equals any of the twenty naturally occurring L-amino acids
  MISC_FEATURE (96): Xaa equals any of the twenty naturally occurring L-amino acids
  MISC_FEATURE (160): Xaa equals any of the twenty naturally occurring L-amino acids
  MISC_FEATURE (166): Xaa equals any of the twenty naturally occurring L-amino acids
KKGHQLQLDYFGACKSIPTCTDFEVIQFPLRMXDWLKNILMQLYEANSEHAGYXNEKQRNXVKXIYLDEKRLLAGDHXICPXLXGTLXKNYHMYVXPVHWQFSELDQHPMDRVLTHSELAPLRASLVPMEHCITRFFEECDPNKDKHITLKEWGHCFGIXEEDIDX

SEQ ID NO: 3508 - protein, 92 aa, Homo sapiens
  MISC_FEATURE (12): Xaa equals any of the twenty naturally occurring L-amino acids
WKKMKMLTRNQXSQYIKNSVTPDMEEMYKKAHAAIRENPVYEKKPKKEVKKKRWNRPKMSLAQKKDRVAQKKASFLRAQEPGLLRAKPSNFL

SEQ ID NO: 3509 - protein, 145 aa, Homo sapiens
  MISC_FEATURE (103): Xaa equals any of the twenty naturally occurring L-amino acids
  MISC_FEATURE (105): Xaa equals any of the twenty naturally occurring L-amino acids
  MISC_FEATURE (126): Xaa equals any of the twenty naturally occurring L-amino acids
  MISC_FEATURE (129): Xaa equals any of the twenty naturally occurring L-amino acids
  MISC_FEATURE (133): Xaa equals any of the twenty naturally occurring L-amino acids
SRLRAEDCFSSLLQGLVTEPARGATMRQKAVSLFLCYLLLFTCSGVEAGKKKCSESSDSGSGFWKALTFMAVGGGLAVAGLPALGFTGAGIGGQFGGLPSLMXWXAILEWGRRAPAGGAKWATACXSPXGALXGQAKRSGPLRVK

SEQ ID NO: 3510 - protein, 117 aa, Homo sapiens
  MISC_FEATURE (90): Xaa equals any of the twenty naturally occurring L-amino acids
  MISC_FEATURE (98): Xaa equals any of the twenty naturally occurring L-amino acids
GSSLWLHASPSLPSGAGEPNFDGLESNPYRSRKQRHEWEVKALLEKVPAELICLDPRALAEVDVISLEQGKKEQIERLGYDPQAKAPFQXKAKQEGPXSTASLVKKEEGRSWMRNTG

SEQ ID NO: 3511 - protein, 56 aa, Homo sapiens
  MISC_FEATURE (20): Xaa equals any of the twenty naturally occurring L-amino acids
GEVVMGSSTWYAIGIAYKSXPKNEWIGKNASSWVFSRCNSNFVVNFLNFHGLHIYI

SEQ ID NO: 3512 - protein, 111 aa, Homo sapiens
GTLRRDFNHINVELSLLGKKKKRLRVDKWWGNRKELATVRTICSHVQNMIKGVTLGFRYKMRSVYAHFPINVVIQENGSLVEIRNFLGEKYIRRVRMRPGGAWSVSSGPEG

SEQ ID NO: 3513 - protein, 212 aa, Homo sapiens
  MISC_FEATURE (34): Xaa equals any of the twenty naturally occurring L-amino acids
  MISC_FEATURE (61): Xaa equals any of the twenty naturally occurring L-amino acids
  MISC_FEATURE (93): Xaa equals any of the twenty naturally occurring L-amino acids
  MISC_FEATURE (100): Xaa equals any of the twenty naturally occurring L-amino acids
  MISC_FEATURE (104): Xaa equals any of the twenty naturally occurring L-amino acids
  MISC_FEATURE (112): Xaa equals any of the twenty naturally occurring L-amino acids
  MISC_FEATURE (113): Xaa equals any of the twenty naturally occurring L-amino acids
  MISC_FEATURE (179): Xaa equals any of the twenty naturally occurring L-amino acids
  MISC_FEATURE (187): Xaa equals any of the twenty naturally occurring L-amino acids
  MISC_FEATURE (198): Xaa equals any of the twenty naturally occurring L-amino acids
  MISC_FEATURE (202): Xaa equals any of the twenty naturally occurring L-amino acids
  MISC_FEATURE (208): Xaa equals any of the twenty naturally occurring L-amino acids
GAQRDTREPTMAPFEPLASGILLLLWLIAPSRAXTCVPPHPQTAFCNSDLVIRAKFVGTPXVNQTTLYQRYEIKMTKMYKGFQALGDAADIRXVYTPAMXECCXIFPQGPHXXEEFLIAGKLQDGLLHITTCSFVAPWNSLSLAQRRGFTKTYTGAVRNAQCFLFIHPLQLHSGTQCLXTDQLLQAXKRASSPAPCLXLGSXGWQLEXLRPR

SEQ ID NO: 3514 - protein, 226 aa, Homo sapiens
  MISC_FEATURE (79): Xaa equals any of the twenty naturally occurring L-amino acids
  MISC_FEATURE (90): Xaa equals any of the twenty naturally occurring L-amino acids
  MISC_FEATURE (110): Xaa equals any of the twenty naturally occurring L-amino acids
  MISC_FEATURE (143): Xaa equals any of the twenty naturally occurring L-amino acids
  MISC_FEATURE (190): Xaa equals any of the twenty naturally occurring L-amino acids
  MISC_FEATURE (203): Xaa equals any of the twenty naturally occurring L-amino acids
  MISC_FEATURE (225): Xaa equals any of the twenty naturally occurring L-amino acids
GLAGVCALRRSAGYILVGGAGGQSAAAAARRYSEGEWASGGVRSFSRAAAAMAPIKVGDAIPAVEVFEGEPGNKVNLAXLFKGKKGVLFXVPGAFTPGCSKTHLPGFVEXAEALKAKGVQVVACLSVNDAFVTGEWGRAHKAXGKVRLLADPTGAFGKETDLLLDDSLVSIFGNRRLKRFSMVVQDGIVXALNVEPDGTGLNXSLAPNIILQLLRPWARILLQPXL

SEQ ID NO: 3515 - protein, 166 aa, Homo sapiens
AFFFFRLTAGQLRSMSTPARRRLMRDFKRLQEDPPVGVSGAPSENNIMQWNAVIFGPEGTPFEDGTFKLVIEFSEEYPNKPPTVRFLSKMFHPNVYADGSICLDILQNRWSPTYDVSSILTSIQSLLDEPNPNSPANSQAAQLYQENKREYEKRVSAIVEQSWNDS

SEQ ID NO: 3516 - protein, 75 aa, Homo sapiens
FALTTASVIGGGKVPTQWAQTSKGYSSHPLILLPRHFLPLSSHDPKAKGNRSVKNVVRVEPLKYFLILPQNLTVT

SEQ ID NO: 3517 - protein, 125 aa, Homo sapiens
  MISC_FEATURE (108): Xaa equals any of the twenty naturally occurring L-amino acids
AVAHHTTAAFIRVVGSEFVQKYLGEGPRMVRDVFRLAKENAPAIIFIDEIDAIATKRFDAQTGADREVQRILLELLNQMDGFDQNGNGKVIMATNRADTLDPPLLRQXGWTVKLNFHFLTAARRD

SEQ ID NO: 3518 - protein, 78 aa, Homo sapiens
  MISC_FEATURE (38): Xaa equals any of the twenty naturally occurring L-amino acids
  MISC_FEATURE (59): Xaa equals any of the twenty naturally occurring L-amino acids
  MISC_FEATURE (68): Xaa equals any of the twenty naturally occurring L-amino acids
  MISC_FEATURE (76): Xaa equals any of the twenty naturally occurring L-amino acids
PSPSVKDGQTEIRTMVSILNREQKEGVGVREVKDASLXFFLSRQAAVHQWTLAKSNSVXPGQLFRDSXGVTWIFPXQE

SEQ ID NO: 3519 - protein, 176 aa, Homo sapiens
  MISC_FEATURE (166): Xaa equals any of the twenty naturally occurring L-amino acids
TFSFPCQQTSLDAGILITWTKGFKATDCVGHDVVTLLRDAIKRREEFDLDVVAVVNDTVGTMMTCAYEEPTCEVGLIVGTGSNACYMEEMKNVEMVEGDQGQMCINMEWGAFGDNGCLDDIRTHYDRLVDEYSLNAGKQRYEKMISGMYLGEIVRNILIDFTKKGXPLSRADLLDA

SEQ ID NO: 3520 - protein, 65 aa, Homo sapiens
SVIPPLAPNQYLFVEHLLIKTLHMSVHFDLRYNFLCGLNDKSLQTKLGTENQLGDQLFRVHFSWM

SEQ ID NO: 3521 - protein, 72 aa, Homo sapiens
  MISC_FEATURE (1): Xaa equals any of the twenty naturally occurring L-amino acids
  MISC_FEATURE (6): Xaa equals any of the twenty naturally occurring L-amino acids
  MISC_FEATURE (10): Xaa equals any of the twenty naturally occurring L-amino acids
  MISC_FEATURE (11): Xaa equals any of the twenty naturally occurring L-amino acids
  MISC_FEATURE (13): Xaa equals any of the twenty naturally occurring L-amino acids
  MISC_FEATURE (14): Xaa equals any of the twenty naturally occurring L-amino acids
  MISC_FEATURE (19): Xaa equals any of the twenty naturally occurring L-amino acids
  MISC_FEATURE (29): Xaa equals any of the twenty naturally occurring L-amino acids
  MISC_FEATURE (36): Xaa equals any of the twenty naturally occurring L-amino acids
  MISC_FEATURE (38): Xaa equals any of the twenty naturally occurring L-amino acids
  MISC_FEATURE (39): Xaa equals any of the twenty naturally occurring L-amino acids
  MISC_FEATURE (45): Xaa equals any of the twenty naturally occurring L-amino acids
  MISC_FEATURE (51): Xaa equals any of the twenty naturally occurring L-amino acids
  MISC_FEATURE (53): Xaa equals any of the twenty naturally occurring L-amino acids
  MISC_FEATURE (57): Xaa equals any of the twenty naturally occurring L-amino acids
  MISC_FEATURE (60): Xaa equals any of the twenty naturally occurring L-amino acids
  MISC_FEATURE (69): Xaa equals any of the twenty naturally occurring L-amino acids
  MISC_FEATURE (70): Xaa equals any of the twenty naturally occurring L-amino acids
  MISC_FEATURE (71): Xaa equals any of the twenty naturally occurring L-amino acids
XALLAXGNSXXNXXAQVTXSIKIVNIELXTLPIMDXVXXLMKQSXFGQTSXPXTFIXYTXRLSHFVKFXXXT

SEQ ID NO: 3522 - protein, 142 aa, Homo sapiens
  MISC_FEATURE (128): Xaa equals any of the twenty naturally occurring L-amino acids
  MISC_FEATURE (130): Xaa equals any of the twenty naturally occurring L-amino acids
  MISC_FEATURE (136): Xaa equals any of the twenty naturally occurring L-amino acids
  MISC_FEATURE (142): Xaa equals any of the twenty naturally occurring L-amino acids
GPSGLLLGVKQLIVGVNKMDSTEPPYSQKRYEEIVKEVSTYIKKIGYNPDTVAFVPISGWNGDNMLEPSANMPWFKGWKVTRKDGNASGTTLLEALDCILPPTRPTDKPLRLPLQDVYKIGGIWYCSXWXNWRLGXLNPGLX

SEQ ID NO: 3523 - protein, 69 aa, Homo sapiens
  MISC_FEATURE (41): Xaa equals any of the twenty naturally occurring L-amino acids
  MISC_FEATURE (47): Xaa equals any of the twenty naturally occurring L-amino acids
WGLVNLCLCLLGLIFPGGHLQGDLDDLLMEIQLARDLSLSXFGCYWXQILFSVQLVRLKVSLGLVGKTN

SEQ ID NO: 3524 - protein, 131 aa, Homo sapiens
ESPQEIARKVEGQLGCKPEVTIECTGAEASIQAGIYATRSGGTLVLVGLGSEMTTVPLLHAAIREVDIKGVFRYCNTWPVAISMLASKSVNVKPLVTHRFPLEKALEAFETFKKGLGLKIMLKCDPSDQNP

SEQ ID NO: 3525 - protein, 102 aa, Homo sapiens
GGSKASKAKLNTMAGEGMNWRRERRKDWGDPELSTLVLSLQPGLFLLIQKLVGVKRFPFSRSPKVELIAFEGTPSGRRRKIRETYLFLSLECLLNPEIYFPQ

SEQ ID NO: 3526 - protein, 83 aa, Homo sapiens
KRGPRTRIAASSPQPHLVHTVFHCSASSQPQKPAKGPCTMRAEAWRSPGQAGEEQNWALPEHLRFPPASPGLYPERVPRYNKC

SEQ ID NO: 3527 - protein, 152 aa, Homo sapiens
  MISC_FEATURE (79): Xaa equals any of the twenty naturally occurring L-amino acids
  MISC_FEATURE (118): Xaa equals any of the twenty naturally occurring L-amino acids
  MISC_FEATURE (130): Xaa equals any of the twenty naturally occurring L-amino acids
  MISC_FEATURE (145): Xaa equals any of the twenty naturally occurring L-amino acids
GEYEKEKLNERLAKLSDGVAVLKVGGTSDVEVNEKKDRVTDALNATRAAVEEGIVLGGGCALLRCIPALDSLTPANEDXKIGIEIIKRTLKIPAMTIAKNAGVEGSLIVEKIMQRSSXSWLLSYGLENLXNMGGKKGNHWTPTKXVCEETGF

SEQ ID NO: 3528 - protein, 100 aa, Homo sapiens
  MISC_FEATURE (12): Xaa equals any of the twenty naturally occurring L-amino acids
  MISC_FEATURE (14): Xaa equals any of the twenty naturally occurring L-amino acids
  MISC_FEATURE (16): Xaa equals any of the twenty naturally occurring L-amino acids
  MISC_FEATURE (17): Xaa equals any of the twenty naturally occurring L-amino acids
  MISC_FEATURE (21): Xaa equals any of the twenty naturally occurring L-amino acids
  MISC_FEATURE (22): Xaa equals any of the twenty naturally occurring L-amino acids
  MISC_FEATURE (23): Xaa equals any of the twenty naturally occurring L-amino acids
  MISC_FEATURE (35): Xaa equals any of the twenty naturally occurring L-amino acids
  MISC_FEATURE (50): Xaa equals any of the twenty naturally occurring L-amino acids
  MISC_FEATURE (54): Xaa equals any of the twenty naturally occurring L-amino acids
  MISC_FEATURE (59): Xaa equals any of the twenty naturally occurring L-amino acids
  MISC_FEATURE (74): Xaa equals any of the twenty naturally occurring L-amino acids
  MISC_FEATURE (75): Xaa equals any of the twenty naturally occurring L-amino acids
  MISC_FEATURE (79): Xaa equals any of the twenty naturally occurring L-amino acids
  MISC_FEATURE (87): Xaa equals any of the twenty naturally occurring L-amino acids
  MISC_FEATURE (99): Xaa equals any of the twenty naturally occurring L-amino acids
TSMSSVRAMAAXLXKXXKLKXXXWVDTVKLAKHKXLAPYHENWFYTRAAXTERXLYLRXGASVGSMTNIYGGRXXNGVXPSHFSRGXKSVARQVSKPCXG

SEQ ID NO: 3529 - protein, 170 aa, Homo sapiens
  MISC_FEATURE (105): Xaa equals any of the twenty naturally occurring L-amino acids
  MISC_FEATURE (152): Xaa equals any of the twenty naturally occurring L-amino acids
  MISC_FEATURE (169): Xaa equals any of the twenty naturally occurring L-amino acids
  MISC_FEATURE (170): Xaa equals any of the twenty naturally occurring L-amino acids
WRIFAPNHVVAKSRFWYFVSQLKKMKKSSGEIVYCGQVFEKSPLRVKNFGIWLRYDSRSGTHNMYREYRDLTTAGAVTQCYRDMGARHRARAHSIQIMKVEEIAXSKCRRPVVKQFHDSKIKFPLPTGSCAVSTSHAYHQEAQHLLLGAGPXSGCAPNKLRNAPVKKKXX

SEQ ID NO: 3530 - protein, 129 aa, Homo sapiens
  MISC_FEATURE (50): Xaa equals any of the twenty naturally occurring L-amino acids
AGLSLSQLIVQNTLPAACLLFTMASSDIQVKELEKRASGQAFELILSPRXKESVPEFPLSPPKKKDLSLEEIQKKLEAAEERRKSHEAEVLKQLAEKREHEKEVLQKAIEENNNFSKMARRETDPQNGS

SEQ ID NO: 3531 - protein, 235 aa, Homo sapiens
  MISC_FEATURE (10): Xaa equals any of the twenty naturally occurring L-amino acids
  MISC_FEATURE (14): Xaa equals any of the twenty naturally occurring L-amino acids
  MISC_FEATURE (15): Xaa equals any of the twenty naturally occurring L-amino acids
  MISC_FEATURE (44): Xaa equals any of the twenty naturally occurring L-amino acids
  MISC_FEATURE (136): Xaa equals any of the twenty naturally occurring L-amino acids
  MISC_FEATURE (198): Xaa equals any of the twenty naturally occurring L-amino acids
  MISC_FEATURE (211): Xaa equals any of the twenty naturally occurring L-amino acids
GGDGNGKLRXTLRXXATPAGTGPEFPGRPTCLAEPHRSDTMGKXKVGVNGFGRIGRLVTRAAFNSGKVDIVAINDPFIDLNYMVYMFQYDSTHGKFHGTVKAENGKLVINGNPITIFQERDPSKIKWGDAGAEYVXESTGVFTTMEKAGAHLQGGAKRVIISAPSADAPMFVMGVNHEKYDNSLKIISNASCTTNCLXPLAKVIHDNFGIXEGLMTTVHAITATQKTVDGPSGKL

SEQ ID NO: 3532 - protein, 96 aa, Homo sapiens
  MISC_FEATURE (7): Xaa equals any of the twenty naturally occurring L-amino acids
  MISC_FEATURE (11): Xaa equals any of the twenty naturally occurring L-amino acids
  MISC_FEATURE (17): Xaa equals any of the twenty naturally occurring L-amino acids
  MISC_FEATURE (22): Xaa equals any of the twenty naturally occurring L-amino acids
  MISC_FEATURE (25): Xaa equals any of the twenty naturally occurring L-amino acids
  MISC_FEATURE (40): Xaa equals any of the twenty naturally occurring L-amino acids
  MISC_FEATURE (42): Xaa equals any of the twenty naturally occurring L-amino acids
  MISC_FEATURE (46): Xaa equals any of the twenty naturally occurring L-amino acids
  MISC_FEATURE (80): Xaa equals any of the twenty naturally occurring L-amino acids
  MISC_FEATURE (88): Xaa equals any of the twenty naturally occurring L-amino acids
ESFPGKXLQAXGVSKVXKEHWXYPXQITTNQWKNGATRDXRXKMLXPATKPEWQRRAESAETRIATLLQQDAMGNHGRHXFCTCNQRXPMLPMWIT

SEQ ID NO: 3533 - protein, 155 aa, Homo sapiens
  MISC_FEATURE (144): Xaa equals any of the twenty naturally occurring L-amino acids
LKDLQARARVDEYLAWQHTTLRRSCLRALWHKVMFPVFLGEPVSPQTLAATLAELDVTLQLLEDKFLQNKAFLTGPHISLADLVAITELMHPVGAGCQVFEGRPKLATWRQRVEAAVGEDLFQEAHEVILKAKDFPPADPTIKXKLMPWVLAMIR

SEQ ID NO: 3534 - protein, 141 aa, Homo sapiens
  MISC_FEATURE (2): Xaa equals any of the twenty naturally occurring L-amino acids
  MISC_FEATURE (21): Xaa equals any of the twenty naturally occurring L-amino acids
  MISC_FEATURE (41): Xaa equals any of the twenty naturally occurring L-amino acids
  MISC_FEATURE (91): Xaa equals any of the twenty naturally occurring L-amino acids
  MISC_FEATURE (124): Xaa equals any of the twenty naturally occurring L-amino acids
  MISC_FEATURE (133): Xaa equals any of the twenty naturally occurring L-amino acids
SXYKSAPTSPFLTNDFSRELXSSLTLGKVNVFPSSRSQKGXSASLLLTECLILPGVPLPPCLGHRLNLTMPGSWDQARGHPPFLPHVINGXRADQRTLTAELPLSVDRASVILRPVADTSCFHXIFVKSAVLXSLEEFLLP

SEQ ID NO: 3535 - protein, 166 aa, Homo sapiens
  MISC_FEATURE (7): Xaa equals any of the twenty naturally occurring L-amino acids
  MISC_FEATURE (16): Xaa equals any of the twenty naturally occurring L-amino acids
LLNTLEXSFGMARLQXPVRNSRVDPRVRLCELAQDKEAADAIDAEGASAPLMELLHSRNEGTATYAAAVLFRISEDKNPDYRKRVSVELTNSLFKHDPAAWEAAQSMIPINEPYGDDLDATYRPMYSSDVPLDPLEMHMDMDGDYPIDTYSDGLRPPYPTADHMLA

SEQ ID NO: 3536 - protein, 164 aa, Homo sapiens
  MISC_FEATURE (98): Xaa equals any of the twenty naturally occurring L-amino acids
  MISC_FEATURE (148): Xaa equals any of the twenty naturally occurring L-amino acids
  MISC_FEATURE (155): Xaa equals any of the twenty naturally occurring L-amino acids
  MISC_FEATURE (161): Xaa equals any of the twenty naturally occurring L-amino acids
EKMVLLTAVLLLLAAYAGPAQSLGSFVHCEPCDEKALSMCPPSPLGCELVKEPGCGCCMTCALAEGQSCGVYTERCAQGLRCLPRQDEEKPLHALLTXAGFASTKRATASKSRSRETPVSTRSPPPLRWPRRPTPPRIFRAKHTRISXLEGLKAXKKGTGXKEA

SEQ ID NO: 3537 - protein, 50 aa, Homo sapiens
  MISC_FEATURE (41): Xaa equals any of the twenty naturally occurring L-amino acids
  MISC_FEATURE (47): Xaa equals any of the twenty naturally occurring L-amino acids
LDHFQHPFCSKISWFCVLHVIHDSALNRKVRIIEVCLVLCXPTSWDXACT

SEQ ID NO: 3538 - protein, 93 aa, Homo sapiens
ETRGTGEYMAAKKHLEINPDHSIIETLRQKAEADKNDKSVKDLVILLYETALLSSGFSLEDPQTHANRIYRMIKLGSGVLMKMTLLLMIPVLL

SEQ ID NO: 3539 - protein, 155 aa, Homo sapiens
  MISC_FEATURE (6): Xaa equals any of the twenty naturally occurring L-amino acids
  MISC_FEATURE (26): Xaa equals any of the twenty naturally occurring L-amino acids
  MISC_FEATURE (35): Xaa equals any of the twenty naturally occurring L-amino acids
ISLAVXLQAPVRNSRVDPRVRRAATXVRMNVLADXLKSINNAEKRGKRQVLIRPCSKVIVRFLTVMMKHGYIGEFEIIDDHRAGKIVVNLTGRLNKCGVISPRFDVQLKDLEKWQNNLLPSRQFGFIVLTTSAGIMDHEEARRKHTGGKILGFFF

SEQ ID NO: 3540 - protein, 66 aa, Homo sapiens
QGRMLGGKVHGSLARAGKVRGQTPKVAKQEKKKKKTGRAKRRMQYNRRFVNVVPTFGKKKGPNANS

SEQ ID NO: 3541 - protein, 131 aa, Homo sapiens
  MISC_FEATURE (1): Xaa equals any of the twenty naturally occurring L-amino acids
XSGRGDLLYGCYTRPQINTEIVQNVTGPGQRTNMGILFMSKVGLRGDRRSEGDEVLDPLRQALDSSMQSHNLYQHPQRLAFHVSAPVASTVQQASGLLGPLPHLSSFALQPAHSLLPPLGSHGAEVSKKMA

SEQ ID NO: 3542 - protein, 90 aa, Homo sapiens
  MISC_FEATURE (28): Xaa equals any of the twenty naturally occurring L-amino acids
  MISC_FEATURE (50): Xaa equals any of the twenty naturally occurring L-amino acids
  MISC_FEATURE (55): Xaa equals any of the twenty naturally occurring L-amino acids
  MISC_FEATURE (64): Xaa equals any of the twenty naturally occurring L-amino acids
  MISC_FEATURE (75): Xaa equals any of the twenty naturally occurring L-amino acids
  MISC_FEATURE (84): Xaa equals any of the twenty naturally occurring L-amino acids
  MISC_FEATURE (85): Xaa equals any of the twenty naturally occurring L-amino acids
  MISC_FEATURE (88): Xaa equals any of the twenty naturally occurring L-amino acids
  MISC_FEATURE (89): Xaa equals any of the twenty naturally occurring L-amino acids
KYRHSHISPVHHHFLLYLSVQFLFTLGXWFKLLGARTVSSLGSGQAHPAXLLLLXLLENQGSSXGSRDWQACFSXEGPKSRVRXXKGXXS

SEQ ID NO: 3543 - protein, 162 aa, Homo sapiens
  MISC_FEATURE (155): Xaa equals any of the twenty naturally occurring L-amino acids
AKEILTKESNVQEVRCPVTVCGDVHGQFHDLMELFRIGGKSPDTNYLFMGDYVDRGYYSVETVTLLVALKVRYPERITILRGNHESRQITQVYGFYDECLRKYGNANVWKYFTDLFDYLPLTALVDGQIFCLHGGLSPSIDTLDHIRALDRLQEXSHEGPMG

SEQ ID NO: 3544 - protein, 94 aa, Homo sapiens
GLGLRPMPRRRRVPLPQHSKYLHTHPSGRDPDTPILIIKQGFEPPIFTGWFLAWDPNIWSAGKTYEQLKEELGDAAAIMRITADMKNATLSPEF

SEQ ID NO: 3545 - protein, 136 aa, Homo sapiens
  MISC_FEATURE (120): Xaa equals any of the twenty naturally occurring L-amino acids
  MISC_FEATURE (125): Xaa equals any of the twenty naturally occurring L-amino acids
  MISC_FEATURE (126): Xaa equals any of the twenty naturally occurring L-amino acids
  MISC_FEATURE (127): Xaa equals any of the twenty naturally occurring L-amino acids
  MISC_FEATURE (131): Xaa equals any of the twenty naturally occurring L-amino acids
  MISC_FEATURE (132): Xaa equals any of the twenty naturally occurring L-amino acids
GDRVFVHYTGWLLDGTKFDSSLDRKDKFSFDLGKGEVIKAWDIAIATMKVGEVCHITCKPEYAYGSAGSPPKIPPNATLVFEVELFEFKGEDLTEEKLEQSTIVKERGTVYFKEGKYQQXFTSGXXXSGLXXEYEV

SEQ ID NO: 3546 - protein, 177 aa, Homo sapiens
  MISC_FEATURE (138): Xaa equals any of the twenty naturally occurring L-amino acids
  MISC_FEATURE (149): Xaa equals any of the twenty naturally occurring L-amino acids
RARALPPPRPAMLLSVPLLLGLLGLAVAEPAVYFKEQFLDGDGWTSRWIESKHKSDFGKFVLSSGKFYGDEEKDKGLQTSQDARFYALSASFEPFSNKGQTLVVQFTVKHEQNIDCGGGYVKLFLIVWTRQTCTGNSXYNIMVGPRHLXALAPKKVHVIFNYKGKNGLINKGHPLQG

SEQ ID NO: 3547 - protein, 127 aa, Homo sapiens
  MISC_FEATURE (16): Xaa equals any of the twenty naturally occurring L-amino acids
  MISC_FEATURE (18): Xaa equals any of the twenty naturally occurring L-amino acids
  MISC_FEATURE (97): Xaa equals any of the twenty naturally occurring L-amino acids
  MISC_FEATURE (113): Xaa equals any of the twenty naturally occurring L-amino acids
  MISC_FEATURE (121): Xaa equals any of the twenty naturally occurring L-amino acids
KLYGKPIRVNKASAHXGXLDVGANIFIGNLDPEIDEKLLYDTFSAFGVILQTPKIMRDPDTGNSKGYAFINFASFDASDAAIEAMNGQYLCNRPITXSYAFKKDFKGERHGSXAERLLASXKPVFQA

SEQ ID NO: 3548 - protein, 149 aa, Homo sapiens
  MISC_FEATURE (26): Xaa equals any of the twenty naturally occurring L-amino acids
  MISC_FEATURE (71): Xaa equals any of the twenty naturally occurring L-amino acids
  MISC_FEATURE (131): Xaa equals any of the twenty naturally occurring L-amino acids
  MISC_FEATURE (136): Xaa equals any of the twenty naturally occurring L-amino acids
ESRPADRRVLPPIHVKMTKFGFLRLXYEKQDTLLKLLILSMAAVLSFSTRLFAVLRFESVIHEFDPYFNYXTTRFLAEEGFYKFHNWFDDRAWYPLGRIIGGTIYPGLMITSAAIYHVLHFFHITIDIRNXCVVLXPLFSFFTPSYVPT

SEQ ID NO: 3549 - protein, 64 aa, Homo sapiens
  MISC_FEATURE (15): Xaa equals any of the twenty naturally occurring L-amino acids
  MISC_FEATURE (17): Xaa equals any of the twenty naturally occurring L-amino acids
  MISC_FEATURE (40): Xaa equals any of the twenty naturally occurring L-amino acids
  MISC_FEATURE (41): Xaa equals any of the twenty naturally occurring L-amino acids
  MISC_FEATURE (55): Xaa equals any of the twenty naturally occurring L-amino acids
  MISC_FEATURE (60): Xaa equals any of the twenty naturally occurring L-amino acids
MTVLPLSHQRTTATXAXPAFPSGYLSGWQGKGKNFDVGEXXSGVEEGGGTTGESXVKPTXPRWP

SEQ ID NO: 3550 - protein, 137 aa, Homo sapiens
  MISC_FEATURE (4): Xaa equals any of the twenty naturally occurring L-amino acids
  MISC_FEATURE (112): Xaa equals any of the twenty naturally occurring L-amino acids
  MISC_FEATURE (120): Xaa equals any of the twenty naturally occurring L-amino acids
ANMXRVRTKTVKKAARVIIEKYYTRLGNDFHTNKRVCEEIAIIPSKKLRNKIAGYVTHLMKRIQRGPVRGISIKLQEEERERRDNYVPEVSALDQEIIEVHPDTKEMLKLLXFGSLSNLXVTQPTVGMNFKTPRGPV

SEQ ID NO: 3551 - protein, 54 aa, Homo sapiens
  MISC_FEATURE (48): Xaa equals any of the twenty naturally occurring L-amino acids
  MISC_FEATURE (52): Xaa equals any of the twenty naturally occurring L-amino acids
  MISC_FEATURE (54): Xaa equals any of the twenty naturally occurring L-amino acids
KLFWKLSLKHSRTHSDSLLPALHAAGTEHSDHQREWWTRTLGYFFRFXPVRXTX

SEQ ID NO: 3552 - protein, 191 aa, Homo sapiens
  MISC_FEATURE (7): Xaa equals any of the twenty naturally occurring L-amino acids
  MISC_FEATURE (8): Xaa equals any of the twenty naturally occurring L-amino acids
  MISC_FEATURE (143): Xaa equals any of the twenty naturally occurring L-amino acids
  MISC_FEATURE (144): Xaa equals any of the twenty naturally occurring L-amino acids
  MISC_FEATURE (155): Xaa equals any of the twenty naturally occurring L-amino acids
  MISC_FEATURE (156): Xaa equals any of the twenty naturally occurring L-amino acids
  MISC_FEATURE (159): Xaa equals any of the twenty naturally occurring L-amino acids
  MISC_FEATURE (164): Xaa equals any of the twenty naturally occurring L-amino acids
  MISC_FEATURE (173): Xaa equals any of the twenty naturally occurring L-amino acids
  MISC_FEATURE (180): Xaa equals any of the twenty naturally occurring L-amino acids
  MISC_FEATURE (184): Xaa equals any of the twenty naturally occurring L-amino acids
  MISC_FEATURE (186): Xaa equals any of the twenty naturally occurring L-amino acids
  MISC_FEATURE (189): Xaa equals any of the twenty naturally occurring L-amino acids
AKMIARXXKEINNPESVYYWAQKNHIPVFSPALTDGSLGDMIFFHSYKNPGLVLDIVEDLRLINTQAIFAKCTGMIILGGGVVKHHIANANLMRNGADYAVYINTAQEFDGSDSSARQTRLLLGQDPGGCTARQGLCLTPSWXXPCLGLKPFAQXXWDXLYAMXKETRDLNRXAGPQERXLTPXFXFIXIW

SEQ ID NO: 3553 - protein, 61 aa, Homo sapiens
VATVNKGCNRLSTILYPESLLYVEKSERLDAFTRECLPTQPSQMWTITASTSVGIFLWKFN

SEQ ID NO: 3554 - protein, 49 aa, Homo sapiens
PFSFLFRFEDAAFGLDEFQILLACFLILICLYTYTLCTKCRVIIMLTWT

SEQ ID NO: 3555 - protein, 72 aa, Homo sapiens
AYCVEKLRLPPEKVNPLGGAVALGHPLGCTGARQVITLLNELKRRGKRAYGVVSMCIGTGMGAAAVFEYPGN

SEQ ID NO: 3556 - protein, 93 aa, Homo sapiens
  MISC_FEATURE (88): Xaa equals any of the twenty naturally occurring L-amino acids
ARRAAAASAAEAGIATTGTEDSDDALLKMTISQQEFGRTGLPDLSSMTEEEQIAYAMQMSLQGAEFGQAESADIDASSAMDTSDQAKXEDDTT

SEQ ID NO: 3557 - protein, 81 aa, Homo sapiens
  MISC_FEATURE (8): Xaa equals any of the twenty naturally occurring L-amino acids
  MISC_FEATURE (10): Xaa equals any of the twenty naturally occurring L-amino acids
  MISC_FEATURE (55): Xaa equals any of the twenty naturally occurring L-amino acids
  MISC_FEATURE (65): Xaa equals any of the twenty naturally occurring L-amino acids
RSRSSICXLXAAPQTHTTPCHTGIQSKAGSGLGDPWGLRPLSGPQSPAEEATQPXGRGTVPLHLXQVAAWARRLTPDKASQ

SEQ ID NO: 3558 - protein, 77 aa, Homo sapiens
VPSMPWTLSTTPPDVNDALGYVTRFYREASSGAAKKRLLLFSDGNSQGATPAAIEKAVQEAQRAGIEIFVVVVAAGE

SEQ ID NO: 3559 - protein, 82 aa, Homo sapiens
  MISC_FEATURE (4): Xaa equals any of the twenty naturally occurring L-amino acids
KVVXKKHYIRKGMGFSILKVLEREIQAIKVTKFLSMSISHLSFKGGVSSIISTFNLPPSSTLEESAHSVKWNPSLSNSTSLT

SEQ ID NO: 3560 - protein, 45 aa, Homo sapiens
  MISC_FEATURE (1): Xaa equals any of the twenty naturally occurring L-amino acids
  MISC_FEATURE (4): Xaa equals any of the twenty naturally occurring L-amino acids
  MISC_FEATURE (15): Xaa equals any of the twenty naturally occurring L-amino acids
  MISC_FEATURE (16): Xaa equals any of the twenty naturally occurring L-amino acids
  MISC_FEATURE (19): Xaa equals any of the twenty naturally occurring L-amino acids
  MISC_FEATURE (40): Xaa equals any of the twenty naturally occurring L-amino acids
XACXKENMAVAVGTXXEQXEKAKESLKNVDENIRKLTGRXPNDVR

SEQ ID NO: 3561 - protein, 91 aa, Homo sapiens
  MISC_FEATURE (17): Xaa equals any of the twenty naturally occurring L-amino acids
  MISC_FEATURE (85): Xaa equals any of the twenty naturally occurring L-amino acids
GAGRQREGARPSGGGVXAENMAGGKAGKDSGKAKAKAVSRSQRAGLQFPVGRIHRHLKTRTTSHGRVGATAAVYSAAILEYLTAXGAGAGR

SEQ ID NO: 3562 - protein, 195 aa, Homo sapiens
  MISC_FEATURE (174): Xaa equals any of the twenty naturally occurring L-amino acids
  MISC_FEATURE (175): Xaa equals any of the twenty naturally occurring L-amino acids
  MISC_FEATURE (177): Xaa equals any of the twenty naturally occurring L-amino acids
  MISC_FEATURE (190): Xaa equals any of the twenty naturally occurring L-amino acids
  MISC_FEATURE (193): Xaa equals any of the twenty naturally occurring L-amino acids
LKPYPVSPSDKVLIQEKTQLKGSELEITLTRGSSLPGPACAYVNLNICANGSEQGGVLLLENPKGDNRLDLLKLKSVVTSIFGVKNTELAVFHDETEIQNQTDLLSLSGKTLCVTAGLAPSLINSSSTLLWQYINLQLLNAKPQEWLMGTVGTLLLETHLGRMDSPTRLLDEQXXGXGLRSKKLSCFEWXTKXRK

SEQ ID NO: 3563 - protein, 111 aa, Homo sapiens
  MISC_FEATURE (10): Xaa equals any of the twenty naturally occurring L-amino acids
  MISC_FEATURE (12): Xaa equals any of the twenty naturally occurring L-amino acids
  MISC_FEATURE (75): Xaa equals any of the twenty naturally occurring L-amino acids
  MISC_FEATURE (101): Xaa equals any of the twenty naturally occurring L-amino acids
  MISC_FEATURE (108): Xaa equals any of the twenty naturally occurring L-amino acids
MGKNSSIRGXKXWVTAWQPNPGPGKFPGGRDPRPSRGHNPGRLWDRGPMGGREARSRQWVLGNGLEGTFPSLPKXPGAFSLGGKFWNLSLKVSLKAFLGLXQTFPIFXSLG

SEQ ID NO: 3564 - protein, 131 aa, Homo sapiens
  MISC_FEATURE (113): Xaa equals any of the twenty naturally occurring L-amino acids
  MISC_FEATURE (119): Xaa equals any of the twenty naturally occurring L-amino acids
  MISC_FEATURE (122): Xaa equals any of the twenty naturally occurring L-amino acids
  MISC_FEATURE (129): Xaa equals any of the twenty naturally occurring L-amino acids
  MISC_FEATURE (130): Xaa equals any of the twenty naturally occurring L-amino acids
ERVVSWLVSSDNPQPEMEVRDRMWLKITIPNAFLGSDVVDWLYHHVEGFPERREARKYASGLLKAGLIRHTVNKITFSEQCYYVFGDLSGGCESYLVNLSLNDNDGFRGGLDXDTLGTXLGXTPGPWCXXF

SEQ ID NO: 3565 - protein, 142 aa, Homo sapiens
MIRFILIQNRAGKTRLAKWYMQFDDDEKQKLIEEVHAVVTVRDAKHTNFVEFRNFKIIYRRYAGLYFCICVDVNDNNLAYLEAIHNFVEVLNEYFHNVCELDLVFNFYKVYTVVDEMFLAGEIRETSQTKVLKQLLMLQSLE

SEQ ID NO: 3566 - protein, 162 aa, Homo sapiens
  MISC_FEATURE (1): Xaa equals any of the twenty naturally occurring L-amino acids
  MISC_FEATURE (2): Xaa equals any of the twenty naturally occurring L-amino acids
  MISC_FEATURE (10): Xaa equals any of the twenty naturally occurring L-amino acids
  MISC_FEATURE (42): Xaa equals any of the twenty naturally occurring L-amino acids
  MISC_FEATURE (49): Xaa equals any of the twenty naturally occurring L-amino acids
  MISC_FEATURE (50): Xaa equals any of the twenty naturally occurring L-amino acids
  MISC_FEATURE (52): Xaa equals any of the twenty naturally occurring L-amino acids
  MISC_FEATURE (68): Xaa equals any of the twenty naturally occurring L-amino acids
  MISC_FEATURE (80): Xaa equals any of the twenty naturally occurring L-amino acids
  MISC_FEATURE (84): Xaa equals any of the twenty naturally occurring L-amino acids
  MISC_FEATURE (87): Xaa equals any of the twenty naturally occurring L-amino acids
  MISC_FEATURE (95): Xaa equals any of the twenty naturally occurring L-amino acids
  MISC_FEATURE (99): Xaa equals any of the twenty naturally occurring L-amino acids
  MISC_FEATURE (101): Xaa equals any of the twenty naturally occurring L-amino acids
  MISC_FEATURE (104): Xaa equals any of the twenty naturally occurring L-amino acids
  MISC_FEATURE (111): Xaa equals any of the twenty naturally occurring L-amino acids
  MISC_FEATURE (118): Xaa equals any of the twenty naturally occurring L-amino acids
  MISC_FEATURE (134): Xaa equals any of the twenty naturally occurring L-amino acids
  MISC_FEATURE (142): Xaa equals any of the twenty naturally occurring L-amino acids
  MISC_FEATURE (155): Xaa equals any of the twenty naturally occurring L-amino acids
  MISC_FEATURE (156): Xaa equals any of the twenty naturally occurring L-amino acids
XXDTREPTMXPFEPLASGILLLLWLIAPSRACTCVPPHPQTXFCNSDLXXRXKFVGTPEVNQTTLYQXYEIKMTKMYKGXQALXDAXDIRFVYTXAMEXVXGYXHRSHNRXEEFLIAXKLQDGLLHITTCSFVXPWNSLSLXQRRGFTKTYTVGXXECTVFP

SEQ ID NO: 3567 - protein, 178 aa, Homo sapiens
STSTCLTWVASSDERRKWIQCFNDVTAIIFVVASSSYNMVIREDNQTNRLQEALNLFKSIWNNRWLRTISVILFLNKQDLLAEKVLAGKSKIEDYFPEFARYTTPEDATPEPGEDPRVTRAKYFIRDEFLRISTASGDGRHYCYPHFTCAVDTENIRRVFNDCRDIIQRMHLRQYELL

SEQ ID NO: 3568 - protein, 196 aa, Homo sapiens
  MISC_FEATURE (141): Xaa equals any of the twenty naturally occurring L-amino acids
  MISC_FEATURE (187): Xaa equals any of the twenty naturally occurring L-amino acids
  MISC_FEATURE (188): Xaa equals any of the twenty naturally occurring L-amino acids
EQIIKGRDVIAQSQSGTGKTATFSISVLQCLDIQVRETQALILAPTRELAVQIQKGLLALGDYMNVQCHACIGGTNVGEDIRKLDYGQHVVAGTPGRVFDMIRRRSLRTRAIKMLVLDEADEMLNKGFKEQIYDVYRYLPXATQVVLISATLPHEILEMTNKVMTDPIRILVKRDELTLEGIKQFFXXWKREEVEI

SEQ ID NO: 3569 - protein, 56 aa, Homo sapiens
  MISC_FEATURE (1): Xaa equals any of the twenty naturally occurring L-amino acids
  MISC_FEATURE (5): Xaa equals any of the twenty naturally occurring L-amino acids
  MISC_FEATURE (13): Xaa equals any of the twenty naturally occurring L-amino acids
  MISC_FEATURE (34): Xaa equals any of the twenty naturally occurring L-amino acids
  MISC_FEATURE (45): Xaa equals any of the twenty naturally occurring L-amino acids
  MISC_FEATURE (54): Xaa equals any of the twenty naturally occurring L-amino acids
  MISC_FEATURE (56): Xaa equals any of the twenty naturally occurring L-amino acids
XIKPXGTIEKAVXLSAAESPCALVAASTDGWQHXENHESTSVPNXKDISTITIXVX

SEQ ID NO: 3570 - protein, 65 aa, Homo sapiens
KPKTKILKMVYYPELFVWVSQEPFPNKDMEGRLLRERLPVPKEVNRKKNDETNACLLDSMGKNGL

SEQ ID NO: 3571 - protein, 146 aa, Homo sapiens
TSVRSSPMPPGRPPPGRSPSPRRRAPPRPGKGTESSQAMLQVWGPGTLCSQRGPPRPVRLGVGTAVAGSCSAPSHPAAGSQPAAPCQRPEAWAGGRGTVPENRARPKVPASRFRVPREAVAPAPSPAETSFLYIIKFGFILIFLGH

SEQ ID NO: 3572 - protein, 93 aa, Homo sapiens
  MISC_FEATURE (11): Xaa equals any of the twenty naturally occurring L-amino acids
ELEEEYEYEDXEAEGEIRVRPKKTTKKRVSRRSIFEMYEPSELESSHLTDQDNEIRATDLPERFQLRSIPVKGAEDDEDDDVDTKKQKTDEDD

SEQ ID NO: 3573 - protein, 34 aa, Homo sapiens
  MISC_FEATURE (1): Xaa equals any of the twenty naturally occurring L-amino acids
  MISC_FEATURE (9): Xaa equals any of the twenty naturally occurring L-amino acids
  MISC_FEATURE (10): Xaa equals any of the twenty naturally occurring L-amino acids
  MISC_FEATURE (11): Xaa equals any of the twenty naturally occurring L-amino acids
  MISC_FEATURE (13): Xaa equals any of the twenty naturally occurring L-amino acids
  MISC_FEATURE (17): Xaa equals any of the twenty naturally occurring L-amino acids
  MISC_FEATURE (28): Xaa equals any of the twenty naturally occurring L-amino acids
XKAYDVCIXXXRXLASXYLLHWGKDILXTTHDIS

SEQ ID NO: 3574 - protein, 67 aa, Homo sapiens
YDQGYGNYNSAYGGDQNYSGYGGYDYTGYNYGNYGYGQGYADYSGQQSTYGKASRGGGNHQNNYQPY

SEQ ID NO: 3575 - protein, 75 aa, Homo sapiens
  MISC_FEATURE (2): Xaa equals any of the twenty naturally occurring L-amino acids
AXIGAIRINTQEYLDVLGRPMVLAGKEAKQVQWTNVYEDALGLGLVVTGTLPVFNLTQDGPGEKKNQLILGVMGI

SEQ ID NO: 3576 - protein, 76 aa, Homo sapiens
  MISC_FEATURE (2): Xaa equals any of the twenty naturally occurring L-amino acids
  MISC_FEATURE (8): Xaa equals any of the twenty naturally occurring L-amino acids
  MISC_FEATURE (11): Xaa equals any of the twenty naturally occurring L-amino acids
  MISC_FEATURE (14): Xaa equals any of the twenty naturally occurring L-amino acids
  MISC_FEATURE (26): Xaa equals any of the twenty naturally occurring L-amino acids
  MISC_FEATURE (27): Xaa equals any of the twenty naturally occurring L-amino acids
  MISC_FEATURE (31): Xaa equals any of the twenty naturally occurring L-amino acids
  MISC_FEATURE (32): Xaa equals any of the twenty naturally occurring L-amino acids
  MISC_FEATURE (33): Xaa equals any of the twenty naturally occurring L-amino acids
  MISC_FEATURE (34): Xaa equals any of the twenty naturally occurring L-amino acids
  MISC_FEATURE (38): Xaa equals any of the twenty naturally occurring L-amino acids
  MISC_FEATURE (42): Xaa equals any of the twenty naturally occurring L-amino acids
  MISC_FEATURE (56): Xaa equals any of the twenty naturally occurring L-amino acids
  MISC_FEATURE (59): Xaa equals any of the twenty naturally occurring L-amino acids
  MISC_FEATURE (63): Xaa equals any of the twenty naturally occurring L-amino acids
  MISC_FEATURE (65): Xaa equals any of the twenty naturally occurring L-amino acids
  MISC_FEATURE (69): Xaa equals any of the twenty naturally occurring L-amino acids
SXGYIACXFTXIWXIYSTVKATYDGXXDTLXXXXLVVXTVIXAILGNHDFTPLEIXWTXSIYXSXGPSXRTCYGKL

SEQ ID NO: 3577 - protein, 89 aa, Homo sapiens
GAFSVYSDFLLYKSGVYQHVTGEMMGGHAIRILGWGVENGTPYWLVANSWNTDWGDNGFFKILRGQDHCGIESQVVAGIPRTDQYWEKI

SEQ ID NO: 3578 - protein, 87 aa, Homo sapiens
  MISC_FEATURE (35): Xaa equals any of the twenty naturally occurring L-amino acids
  MISC_FEATURE (69): Xaa equals any of the twenty naturally occurring L-amino acids
  MISC_FEATURE (80): Xaa equals any of the twenty naturally occurring L-amino acids
  MISC_FEATURE (84): Xaa equals any of the twenty naturally occurring L-amino acids
  MISC_FEATURE (86): Xaa equals any of the twenty naturally occurring L-amino acids
ACPVPCHGLHGGKGKHRCTDGQILSFNKSGGGGDXHQGFSLFYRMNKTGTQYLLKGATGLWGKAWEFSXFKNSAKFTRKXEDLXYXA

SEQ ID NO: 3579 - protein, 130 aa, Homo sapiens
  MISC_FEATURE (10): Xaa equals any of the twenty naturally occurring L-amino acids
  MISC_FEATURE (14): Xaa equals any of the twenty naturally occurring L-amino acids
  MISC_FEATURE (16): Xaa equals any of the twenty naturally occurring L-amino acids
  MISC_FEATURE (18): Xaa equals any of the twenty naturally occurring L-amino acids
  MISC_FEATURE (37): Xaa equals any of the twenty naturally occurring L-amino acids
  MISC_FEATURE (60): Xaa equals any of the twenty naturally occurring L-amino acids
  MISC_FEATURE (65): Xaa equals any of the twenty naturally occurring L-amino acids
  MISC_FEATURE (67): Xaa equals any of the twenty naturally occurring L-amino acids
  MISC_FEATURE (76): Xaa equals any of the twenty naturally occurring L-amino acids
  MISC_FEATURE (96): Xaa equals any of the twenty naturally occurring L-amino acids
  MISC_FEATURE (111): Xaa equals any of the twenty naturally occurring L-amino acids
  MISC_FEATURE (112): Xaa equals any of the twenty naturally occurring L-amino acids
  MISC_FEATURE (113): Xaa equals any of the twenty naturally occurring L-amino acids
  MISC_FEATURE (115): Xaa equals any of the twenty naturally occurring L-amino acids
AGIAGSTHAXGKMXIXLXFSVKAKHNLMTVEQNNGSXQNKLLAPDMFTESDDMFAAYFDXARLRXGXIGKDFKENXNLRDNWTDAEGYYRVNIGEXLDKRYNVYGYTGQRXXXEXLYEPEIMHEPTKKWL

SEQ ID NO: 3580 - protein, 69 aa, Homo sapiens
  MISC_FEATURE (4): Xaa equals any of the twenty naturally occurring L-amino acids
  MISC_FEATURE (8): Xaa equals any of the twenty naturally occurring L-amino acids
  MISC_FEATURE (24): Xaa equals any of the twenty naturally occurring L-amino acids
RLFXPVRXSRVDPRVRKVHMKDGXNRLQELVDRVLERFQASGLIVKEWNSVKLHATVMNTLFRKDPNVV

SEQ ID NO: 3581 - protein, 167 aa, Homo sapiens
QEVRILLLGLDNAGKTTLLKQLASEDISHITPTQGFNIKSVQSQGFKLNVWDIGGQRKIRPYWKNYFENTDILIYVIDSADRKRFEETGQELAELLEEEKLSCVPVLIFANKQDLLTAAPASEIAEGLNLHTIRDRVWQIQSCSALTGEGVQDGMNWVCKNVNAKKK

SEQ ID NO: 3582 - protein, 99 aa, Homo sapiens
  MISC_FEATURE (3): Xaa equals any of the twenty naturally occurring L-amino acids
GGXFPETMMYFFIHESVQSACYRVRSLAASLPREVSPLFENSVCGIFRHFSTSGYLFHLGQASSEKLVPRVGGTEPDWTWSLSTACSVAMTDHGSCIFG

SEQ ID NO: 3583 - protein, 231 aa, Homo sapiens
  MISC_FEATURE (216): Xaa equals any of the twenty naturally occurring L-amino acids
ETDAFYKREMFDPAEKYKMDHRRRGIALIFNHERFFWHLTLPERRGTCADRDNLTRRFSDLGFEVKCFNDLKAEELLLKIHEVSTVSHADADCFVCVFLSHGEGNHIYAYDAKIEIQTLTGLFKGDKCHSLVGKPKIFIIQACRGNQHDVPVIPLDVVDNQTEKLDTNITEVDAASVYTLPAGADFLMWYSVAEGYYSHRETVNGSWYIQELCEMXGKYGSSLELQNFSHW

SEQ ID NO: 3584 - protein, 66 aa, Homo sapiens
  MISC_FEATURE (30): Xaa equals any of the twenty naturally occurring L-amino acids
  MISC_FEATURE (56): Xaa equals any of the twenty naturally occurring L-amino acids
VLADIASCFPQCRAAVSVAFAEVERRLRSXGAAQAALRTELSACGPLSALKTRRSXWGRCRHWWEV

SEQ ID NO: 3585 - protein, 59 aa, Homo sapiens
VLFFYECPNLCFPLPSQTVWPVESVWFVFISPSFLEQGLRPCHISYALHPRLFWTLKVD

SEQ ID NO: 3586 - protein, 153 aa, Homo sapiens
EIVKTGLWVGDCFIYTSSVNRLNYYVGGEIVTIAHLDRTMYLLGYIPKDNRLYLGDKELNIISYSLLVSVLEYQTAVMRRDFSMADKVLPTIPKEQRTRVAHFLEKQGFKQQALTVSTDPEHRFELALQLGELKIAYQLASGSRVRTEVETTC

SEQ ID NO: 3587 - protein, 64 aa, Homo sapiens
  MISC_FEATURE (38): Xaa equals any of the twenty naturally occurring L-amino acids
  MISC_FEATURE (52): Xaa equals any of the twenty naturally occurring L-amino acids
  MISC_FEATURE (63): Xaa equals any of the twenty naturally occurring L-amino acids
  MISC_FEATURE (64): Xaa equals any of the twenty naturally occurring L-amino acids
TLPEALVAWHTLILRCSSNLIWPSSLDDQSPFFPSLEXYMGTNRSNSFEATXCVNEHSCFIPXX

SEQ ID NO: 3588 - protein, 128 aa, Homo sapiens
  MISC_FEATURE (5): Xaa equals any of the twenty naturally occurring L-amino acids
  MISC_FEATURE (8): Xaa equals any of the twenty naturally occurring L-amino acids
  MISC_FEATURE (9): Xaa equals any of the twenty naturally occurring L-amino acids
KGGEXGGXXTIGKAGTPAGTGPEFPGRPTRPVSLSTVPASGHHSGPSLHAENHTSQTFTQHFLPQSQKMHKEEHEVAVLGAPPSTILPRSTVINIHSETSVPDHVVWSLFNTLFLNWCCLGFIAFATP

SEQ ID NO: 3589 - protein, 88 aa, Homo sapiens
  MISC_FEATURE (3): Xaa equals any of the twenty naturally occurring L-amino acids
  MISC_FEATURE (8): Xaa equals any of the twenty naturally occurring L-amino acids
GAXVGTPXGTGPEFPGRPTRPAIQTLEDSVILELLFLMYTCACKRFEELGVKFVKKPDDGKMKGLAFIQDPDGYWIEILNPNKMATLM

SEQ ID NO: 3590 - protein, 151 aa, Homo sapiens
  MISC_FEATURE (2): Xaa equals any of the twenty naturally occurring L-amino acids
  MISC_FEATURE (9): Xaa equals any of the twenty naturally occurring L-amino acids
  MISC_FEATURE (13): Xaa equals any of the twenty naturally occurring L-amino acids
  MISC_FEATURE (120): Xaa equals any of the twenty naturally occurring L-amino acids
  MISC_FEATURE (125): Xaa equals any of the twenty naturally occurring L-amino acids
  MISC_FEATURE (133): Xaa equals any of the twenty naturally occurring L-amino acids
  MISC_FEATURE (148): Xaa equals any of the twenty naturally occurring L-amino acids
EXGDYYREXWYAXRYRSGIPGSTHASGFNSISAVDNGSLANTPHLRELHLDNNKLTRVPGGLAEHKYIQVVYLHNNNISVVGSSDFCPPGHNTKKASYSGVSLFSNPVQYWEIQPSTFRXATCAXAFNFGTIXNSQEALIFITCKILXMHC

SEQ ID NO: 3591 - protein, 157 aa, Homo sapiens
  MISC_FEATURE (152): Xaa equals any of the twenty naturally occurring L-amino acids
MNQEKLAKLQAQVRIGGKGTARRKKKVVHRTATADDKKLQFSLKKLGVNNISGIEEVNMFTNQGTVIHFNNPKVQASLAANTFTITGHAETKQLTEMLPSILNQLGADSLTSLRRLAEALPKQSVDGKAPLATGEDDDDEVPDLVENFDEAXKNEAN

SEQ ID NO: 3592 - protein, 196 aa, Homo sapiens
  MISC_FEATURE (182): Xaa equals any of the twenty naturally occurring L-amino acids
AFIQEADFPFNNYLSMLDTVSGNSVYEVITSWMENMPEGKWPNWMIGGPDSSRLTSRLGNQYVNVMNMLLFTLPGTPITYYGEEIGMGNIVAANLNESYDINTLRSKSPMQWDNSSNAGFSEASNTWLPTNSDYHTVNVDVQKTQPRSALKLYQDLSLLHANELLLNRGWFCHLRNDSHYLXTQETGWHRQNFNGV

SEQ ID NO: 3593 - protein, 79 aa, Homo sapiens
  MISC_FEATURE (1): Xaa equals any of the twenty naturally occurring L-amino acids
  MISC_FEATURE (7): Xaa equals any of the twenty naturally occurring L-amino acids
  MISC_FEATURE (8): Xaa equals any of the twenty naturally occurring L-amino acids
  MISC_FEATURE (27): Xaa equals any of the twenty naturally occurring L-amino acids
XEYPVSXXPAGTGPEFPGRPTRPAQLXACWKLCGNQMKLEGIVTLFPVQGPLPFYLGAREGMGEEREWIYSYPYPHTYT

SEQ ID NO: 3594 - protein, 102 aa, Homo sapiens
  MISC_FEATURE (94): Xaa equals any of the twenty naturally occurring L-amino acids
NYTLSKTEFLSFMNTELAAFTKNQKDPGVLDRMMKKLDTNSDGQLDFSEFLNLIGGLAMACHDSFLKAALPEADLRTPWPWPSTHPLSFQAFLXSSSQATHP

SEQ ID NO: 3595 - protein, 176 aa, Homo sapiens
  MISC_FEATURE (2): Xaa equals any of the twenty naturally occurring L-amino acids
  MISC_FEATURE (5): Xaa equals any of the twenty naturally occurring L-amino acids
  MISC_FEATURE (6): Xaa equals any of the twenty naturally occurring L-amino acids
  MISC_FEATURE (9): Xaa equals any of the twenty naturally occurring L-amino acids
  MISC_FEATURE (101): Xaa equals any of the twenty naturally occurring L-amino acids
  MISC_FEATURE (115): Xaa equals any of the twenty naturally occurring L-amino acids
LXSPXXNTXHYRESWYRLQVPVRNSRVDPRVRNFLRSSRIRVHPTPAASTMPPKFDPNEIKVVYLRCTGGEVGATSALAPKIGPLGLSPKKVGDDIAKATXDWKGLRITVKLTIXNRQAQIEVVPSASALIIKALKEPPRDRKKQNNIKHSGNITFDEIVNIARQMRHRSLARELS

SEQ ID NO: 3596 - protein, 111 aa, Homo sapiens
  MISC_FEATURE (96): Xaa equals any of the twenty naturally occurring L-amino acids
  MISC_FEATURE (107): Xaa equals any of the twenty naturally occurring L-amino acids
  MISC_FEATURE (111): Xaa equals any of the twenty naturally occurring L-amino acids
SPMGPHSMSVPTTPTLGFSTGSPQLSSPMNPVSSSEDIKPPLGLNGVLKVPAHPSGNMASFTKHICAICGDRSSGKHYGVYSCEGCKGFFKRTVRXGLDLKLGGTTXDWLX

SEQ ID NO: 3597 - protein, 87 aa, Homo sapiens
  MISC_FEATURE (14): Xaa equals any of the twenty naturally occurring L-amino acids
  MISC_FEATURE (62): Xaa equals any of the twenty naturally occurring L-amino acids
  MISC_FEATURE (65): Xaa equals any of the twenty naturally occurring L-amino acids
  MISC_FEATURE (70): Xaa equals any of the twenty naturally occurring L-amino acids
  MISC_FEATURE (72): Xaa equals any of the twenty naturally occurring L-amino acids
  MISC_FEATURE (75): Xaa equals any of the twenty naturally occurring L-amino acids
  MISC_FEATURE (77): Xaa equals any of the twenty naturally occurring L-amino acids
  MISC_FEATURE (81): Xaa equals any of the twenty naturally occurring L-amino acids
  MISC_FEATURE (87): Xaa equals any of the twenty naturally occurring L-amino acids
QVVIPWVLGHYSIXRWKEALFLGLDLFNYWFILLWGQCVKSPLRNFQRKEHFMRLSLKVPLXKEXCSLKXTXKRXTXVKPXKLKSYX

SEQ ID NO: 3598 - protein, 105 aa, Homo sapiens
  MISC_FEATURE (96): Xaa equals any of the twenty naturally occurring L-amino acids
  MISC_FEATURE (99): Xaa equals any of the twenty naturally occurring L-amino acids
  MISC_FEATURE (100): Xaa equals any of the twenty naturally occurring L-amino acids
AEPKVNRGKAGVKRSAAEMYGSSFDLDYDFQRDYYDRMYSYPARVPPPPPIARAVVPSKRQRVSGNTSRRGKSGFNSKSGQRGSSKSGKLKGDDLXAIXXGLDPD

SEQ ID NO: 3599 - protein, 146 aa, Homo sapiens
GKLVRLQVPVRNSRVDPRVRSTGVFTTMEKAGAHLQGGAKRVIISAPSADAPMFVMGVNHEKYDNSLKIISNASCTTNCLAPLAKVIHDNFGIVEGLMTTVHAITATQKTVDGPSGKLWRDGRGALQNIIPASTGAAKAVARSSLS

SEQ ID NO: 3600 - protein, 136 aa, Homo sapiens
  MISC_FEATURE (1): Xaa equals any of the twenty naturally occurring L-amino acids
  MISC_FEATURE (21): Xaa equals any of the twenty naturally occurring L-amino acids
  MISC_FEATURE (58): Xaa equals any of the twenty naturally occurring L-amino acids
  MISC_FEATURE (62): Xaa equals any of the twenty naturally occurring L-amino acids
  MISC_FEATURE (74): Xaa equals any of the twenty naturally occurring L-amino acids
  MISC_FEATURE (83): Xaa equals any of the twenty naturally occurring L-amino acids
  MISC_FEATURE (95): Xaa equals any of the twenty naturally occurring L-amino acids
  MISC_FEATURE (104): Xaa equals any of the twenty naturally occurring L-amino acids
  MISC_FEATURE (107): Xaa equals any of the twenty naturally occurring L-amino acids
  MISC_FEATURE (134): Xaa equals any of the twenty naturally occurring L-amino acids
XKVPPAINQFTQALDRQTATXLLKLAHKYRPETKQEKKQRLLARAEKKAAGKGDVPTXRPPXLRAGVNTVTTLXENKKAQLVXIAHDVDPIELVXFFAAWAEKXGSXMDYQGERARLGRLSPQGRTWNQLVAFXTR

SEQ ID NO: 3601 - protein, 105 aa, Homo sapiens
  MISC_FEATURE (103): Xaa equals any of the twenty naturally occurring L-amino acids
AMEEEIAALVIDNGSGMCKAGFAGDDAPRAVFPSIVGRPRHQGVMVGMGQKDSYVGDEAQSKRGILTLKYPIEHGIVTNWDDMEKIWHHTFYNELRVAPEEHXCL

SEQ ID NO: 3602 - protein, 64 aa, Homo sapiens
  MISC_FEATURE (35): Xaa equals any of the twenty naturally occurring L-amino acids
  MISC_FEATURE (37): Xaa equals any of the twenty naturally occurring L-amino acids
  MISC_FEATURE (40): Xaa equals any of the twenty naturally occurring L-amino acids
  MISC_FEATURE (51): Xaa equals any of the twenty naturally occurring L-amino acids
  MISC_FEATURE (58): Xaa equals any of the twenty naturally occurring L-amino acids
  MISC_FEATURE (62): Xaa equals any of the twenty naturally occurring L-amino acids
AEILQESRMMIPDCQRRLEAAYLDLQRILVSKDFXAXLNXFFQSNTWESQXFKYLTLXTSWXHF

SEQ ID NO: 3603 - protein, 108 aa, Homo sapiens
AQVYLSCEVIGIPTPVLIWNKVKRGHYGVQRTELLPGDRDNLAIQTRGGPEKHEVTGWVLVSPLSKEDAGEYECHASNSQGQASASAKITVVDALHEIPVKKGEGAEL

SEQ ID NO: 3604 - protein, 162 aa, Homo sapiens
  MISC_FEATURE (84): Xaa equals any of the twenty naturally occurring L-amino acids
  MISC_FEATURE (87): Xaa equals any of the twenty naturally occurring L-amino acids
  MISC_FEATURE (96): Xaa equals any of the twenty naturally occurring L-amino acids
  MISC_FEATURE (108): Xaa equals any of the twenty naturally occurring L-amino acids
  MISC_FEATURE (131): Xaa equals any of the twenty naturally occurring L-amino acids
  MISC_FEATURE (145): Xaa equals any of the twenty naturally occurring L-amino acids
SFFPSCHRHFSCLPTLTRQNPPSACVQPPVPHPGPDPRVVPTTRSHAHSPSLLPKNCTVCSLQQRIPLASCPWEPFLILQAWAXLLXKAEVALSPXLATLISFGNYQXTLMGTILTGTFSFLSLNFLNLVXYTRHMQMYGLNTPXQICPMNCLSKLEGKKRA

SEQ ID NO: 3605 - protein, 76 aa, Homo sapiens
NGFGNDGSNFGGGGSYNDFGNYNNQSSNFGPMKGGNFGGRSSGPYGGGGQYFAKPRNQGGYGGSSSSSSYGSGRRF

SEQ ID NO: 3606 - protein, 25 aa, Homo sapiens
  MISC_FEATURE (2): Xaa equals any of the twenty naturally occurring L-amino acids
  MISC_FEATURE (5): Xaa equals any of the twenty naturally occurring L-amino acids
AXEKXDFKDLIRQGILKNENGGSRR

SEQ ID NO: 3607 - protein, 54 aa, Homo sapiens
  MISC_FEATURE (17): Xaa equals any of the twenty naturally occurring L-amino acids
  MISC_FEATURE (18): Xaa equals any of the twenty naturally occurring L-amino acids
  MISC_FEATURE (41): Xaa equals any of the twenty naturally occurring L-amino acids
  MISC_FEATURE (52): Xaa equals any of the twenty naturally occurring L-amino acids
  MISC_FEATURE (53): Xaa equals any of the twenty naturally occurring L-amino acids
  MISC_FEATURE (54): Xaa equals any of the twenty naturally occurring L-amino acids
AKFRRAKSSWLGDQREXXGEFIQPEGFYTYFHPTLHLLYNXIHTYTLLWGGXXX

SEQ ID NO: 3608 - protein, 73 aa, Homo sapiens
  MISC_FEATURE (30): Xaa equals any of the twenty naturally occurring L-amino acids
  MISC_FEATURE (37): Xaa equals any of the twenty naturally occurring L-amino acids
  MISC_FEATURE (41): Xaa equals any of the twenty naturally occurring L-amino acids
  MISC_FEATURE (47): Xaa equals any of the twenty naturally occurring L-amino acids
  MISC_FEATURE (48): Xaa equals any of the twenty naturally occurring L-amino acids
  MISC_FEATURE (50): Xaa equals any of the twenty naturally occurring L-amino acids
  MISC_FEATURE (54): Xaa equals any of the twenty naturally occurring L-amino acids
  MISC_FEATURE (56): Xaa equals any of the twenty naturally occurring L-amino acids
  MISC_FEATURE (60): Xaa equals any of the twenty naturally occurring L-amino acids
  MISC_FEATURE (61): Xaa equals any of the twenty naturally occurring L-amino acids
  MISC_FEATURE (62): Xaa equals any of the twenty naturally occurring L-amino acids
  MISC_FEATURE (67): Xaa equals any of the twenty naturally occurring L-amino acids
  MISC_FEATURE (69): Xaa equals any of the twenty naturally occurring L-amino acids
  MISC_FEATURE (72): Xaa equals any of the twenty naturally occurring L-amino acids
QYHPKHTGHNFTTPYPHLWARFSLHGTGLXSLTSGVXPRSXIGPWLXXIXLVIXFXFFFXXXGFGSXEXLRXN

SEQ ID NO: 3609 - protein, 46 aa, Homo sapiens
  MISC_FEATURE (17): Xaa equals any of the twenty naturally occurring L-amino acids
  MISC_FEATURE (20): Xaa equals any of the twenty naturally occurring L-amino acids
  MISC_FEATURE (34): Xaa equals any of the twenty naturally occurring L-amino acids
  MISC_FEATURE (38): Xaa equals any of the twenty naturally occurring L-amino acids
  MISC_FEATURE (45): Xaa equals any of the twenty naturally occurring L-amino acids
AEPAGDSTMPACRLGPXVAXLLLSLLLFGFTLVXGDRXQRRLACXP

SEQ ID NO: 3610 - protein, 64 aa, Homo sapiens
  MISC_FEATURE (42): Xaa equals any of the twenty naturally occurring L-amino acids
HEVEGGGNVEKDPDGAKSQEKEEPEISTEKEDSARLDDHEEXEEEDEEPSHNEDHVTLCRCRWA

SEQ ID NO: 3611 - protein, 95 aa, Homo sapiens
NSSVPHLESRQKPNGTIEEFQTGICIGIRGVNLVSSHRFESSDKLLGGLGPCLAADVPCHSVANPGDPGHAPAIVMQITFLLLNRTCASDFLPSA

SEQ ID NO: 3612 - protein, 18 aa, Homo sapiens
  MISC_FEATURE (13): Xaa equals any of the twenty naturally occurring L-amino acids
  MISC_FEATURE (18): Xaa equals any of the twenty naturally occurring L-amino acids
GISHDDYCAFSFXKLLIX

SEQ ID NO: 3613 - protein, 82 aa, Homo sapiens
  MISC_FEATURE (7): Xaa equals any of the twenty naturally occurring L-amino acids
  MISC_FEATURE (27): Xaa equals any of the twenty naturally occurring L-amino acids
  MISC_FEATURE (33): Xaa equals any of the twenty naturally occurring L-amino acids
  MISC_FEATURE (78): Xaa equals any of the twenty naturally occurring L-amino acids
PFAVLKXDEYVAGQGRNANFQLWSVKXSAGNLXKHCLPRRGHSLGCSALEDGWSLFNPKMCAMNGSTHWKYVSKLQQXNHIL

SEQ ID NO: 3614 - protein, 32 aa, Homo sapiens
NRQHSSSLTFHIIFRIKLDLFTKQSWSDFYRN

SEQ ID NO: 3615 - protein, 66 aa, Homo sapiens
  MISC_FEATURE (1): Xaa equals any of the twenty naturally occurring L-amino acids
  MISC_FEATURE (2): Xaa equals any of the twenty naturally occurring L-amino acids
  MISC_FEATURE (3): Xaa equals any of the twenty naturally occurring L-amino acids
  MISC_FEATURE (14): Xaa equals any of the twenty naturally occurring L-amino acids
  MISC_FEATURE (16): Xaa equals any of the twenty naturally occurring L-amino acids
  MISC_FEATURE (18): Xaa equals any of the twenty naturally occurring L-amino acids
  MISC_FEATURE (32): Xaa equals any of the twenty naturally occurring L-amino acids
  MISC_FEATURE (46): Xaa equals any of the twenty naturally occurring L-amino acids
  MISC_FEATURE (54): Xaa equals any of the twenty naturally occurring L-amino acids
  MISC_FEATURE (56): Xaa equals any of the twenty naturally occurring L-amino acids
  MISC_FEATURE (64): Xaa equals any of the twenty naturally occurring L-amino acids
XXXPVHLRLFQEDXEXEXFPAEDWAGLDDDEXAHVWEDNWDDYNVXDDFSNHLXTXLDKHGSEXET

SEQ ID NO: 3616 - protein, 140 aa, Homo sapiens
  MISC_FEATURE (2): Xaa equals any of the twenty naturally occurring L-amino acids
  MISC_FEATURE (62): Xaa equals any of the twenty naturally occurring L-amino acids
  MISC_FEATURE (85): Xaa equals any of the twenty naturally occurring L-amino acids
  MISC_FEATURE (92): Xaa equals any of the twenty naturally occurring L-amino acids
  MISC_FEATURE (104): Xaa equals any of the twenty naturally occurring L-amino acids
  MISC_FEATURE (136): Xaa equals any of the twenty naturally occurring L-amino acids
MXCWKPSGVEEIVQTLCCPETLSSEQHDSNRPGLGGHVVPSVPEVQECHHVGRPGFIKYYLXISTQSVSMYSPASGTTVPITACXEATAERXSMKVCLFCMETXASTMTISNQRSEHSMKQYGIFPFKTISFNPCXTPFS

SEQ ID NO: 3617 - protein, 65 aa, Homo sapiens
  MISC_FEATURE (34): Xaa equals any of the twenty naturally occurring L-amino acids
  MISC_FEATURE (50): Xaa equals any of the twenty naturally occurring L-amino acids
SRENPYRSSHFTVWDTESKRAQCFFGCVTFTAVXGKINVNYQKIMKRLLXCENMAAIFKGKMEEK

SEQ ID NO: 3618 - protein, 59 aa, Homo sapiens
  MISC_FEATURE (8): Xaa equals any of the twenty naturally occurring L-amino acids
  MISC_FEATURE (20): Xaa equals any of the twenty naturally occurring L-amino acids
  MISC_FEATURE (24): Xaa equals any of the twenty naturally occurring L-amino acids
  MISC_FEATURE (27): Xaa equals any of the twenty naturally occurring L-amino acids
  MISC_FEATURE (29): Xaa equals any of the twenty naturally occurring L-amino acids
  MISC_FEATURE (59): Xaa equals any of the twenty naturally occurring L-amino acids
TLLLISMXVFFLEYRKKGGXAPRXQWXEXLPYNFLMFHYKQFVFRTQKLLILKGMFNMX

SEQ ID NO: 3619 - protein, 65 aa, Homo sapiens
  MISC_FEATURE (10): Xaa equals any of the twenty naturally occurring L-amino acids
  MISC_FEATURE (14): Xaa equals any of the twenty naturally occurring L-amino acids
  MISC_FEATURE (16): Xaa equals any of the twenty naturally occurring L-amino acids
  MISC_FEATURE (29): Xaa equals any of the twenty naturally occurring L-amino acids
  MISC_FEATURE (30): Xaa equals any of the twenty naturally occurring L-amino acids
  MISC_FEATURE (43): Xaa equals any of the twenty naturally occurring L-amino acids
  MISC_FEATURE (49): Xaa equals any of the twenty naturally occurring L-amino acids
  MISC_FEATURE (52): Xaa equals any of the twenty naturally occurring L-amino acids
  MISC_FEATURE (53): Xaa equals any of the twenty naturally occurring L-amino acids
  MISC_FEATURE (56): Xaa equals any of the twenty naturally occurring L-amino acids
RDTVVQNIYXRECXNXKGNVEFSPIGNKXXKDTVESLFQTKLXVGIKLXNIXXMNXKYLKLIMGL

SEQ ID NO: 3620 - protein, 86 aa, Homo sapiens
  MISC_FEATURE (52): Xaa equals any of the twenty naturally occurring L-amino acids
  MISC_FEATURE (59): Xaa equals any of the twenty naturally occurring L-amino acids
  MISC_FEATURE (61): Xaa equals any of the twenty naturally occurring L-amino acids
  MISC_FEATURE (62): Xaa equals any of the twenty naturally occurring L-amino acids
  MISC_FEATURE (79): Xaa equals any of the twenty naturally occurring L-amino acids
  MISC_FEATURE (80): Xaa equals any of the twenty naturally occurring L-amino acids
EVIVFWTHCLKNLHFTEAIVLFTLSNNMSFVSFLDGLQSIKPTLFLISGKNXRVLACVXVXXLIPGSVCSGFWLTFQKXXFFPFLF

SEQ ID NO: 3621 - protein, 68 aa, Homo sapiens
  MISC_FEATURE (6): Xaa equals any of the twenty naturally occurring L-amino acids
  MISC_FEATURE (8): Xaa equals any of the twenty naturally occurring L-amino acids
  MISC_FEATURE (10): Xaa equals any of the twenty naturally occurring L-amino acids
  MISC_FEATURE (11): Xaa equals any of the twenty naturally occurring L-amino acids
  MISC_FEATURE (17): Xaa equals any of the twenty naturally occurring L-amino acids
  MISC_FEATURE (29): Xaa equals any of the twenty naturally occurring L-amino acids
  MISC_FEATURE (39): Xaa equals any of the twenty naturally occurring L-amino acids
  MISC_FEATURE (42): Xaa equals any of the twenty naturally occurring L-amino acids
  MISC_FEATURE (51): Xaa equals any of the twenty naturally occurring L-amino acids
  MISC_FEATURE (54): Xaa equals any of the twenty naturally occurring L-amino acids
  MISC_FEATURE (60): Xaa equals any of the twenty naturally occurring L-amino acids
  MISC_FEATURE (66): Xaa equals any of the twenty naturally occurring L-amino acids
  MISC_FEATURE (68): Xaa equals any of the twenty naturally occurring L-amino acids
HTTMYXYXCXXTGNTSXPENMTHPKGYNXYPAIDPHHQXINXFWEKLFTVXILXKFRDIXDNFEKXFX

SEQ ID NO: 3622 - protein, 58 aa, Homo sapiens
RRKVFIPLIQDCPISTMYVNLSPFLWPNSLFPCVTQSILSPCLPTSILKIIHVALPYT

SEQ ID NO: 3623 - protein, 144 aa, Homo sapiens
  MISC_FEATURE (3): Xaa equals any of the twenty naturally occurring L-amino acids
  MISC_FEATURE (14): Xaa equals any of the twenty naturally occurring L-amino acids
  MISC_FEATURE (37): Xaa equals any of the twenty naturally occurring L-amino acids
  MISC_FEATURE (44): Xaa equals any of the twenty naturally occurring L-amino acids
  MISC_FEATURE (59): Xaa equals any of the twenty naturally occurring L-amino acids
  MISC_FEATURE (61): Xaa equals any of the twenty naturally occurring L-amino acids
  MISC_FEATURE (66): Xaa equals any of the twenty naturally occurring L-amino acids
  MISC_FEATURE (86): Xaa equals any of the twenty naturally occurring L-amino acids
  MISC_FEATURE (108): Xaa equals any of the twenty naturally occurring L-amino acids
  MISC_FEATURE (130): Xaa equals any of the twenty naturally occurring L-amino acids
VQXGLARGKLVVEXTGVDRELQGRVEVDVSPSWNDGXMSLGRVXSGKGFRFINSGRQTXKXSWGAXVRYPQFGKSFGLGFTKDGHXKESFGKFSGFVARGPLFPPCLXAVPLCFSKKGLLESRCVATTTXKSGRYICRPRKTWM

SEQ ID NO: 3624 - protein, 69 aa, Homo sapiens
VPVSAAGSANETPEIPDNVGDWLRGVYRFATDRNDFRRNLILNLGLFAAGVWLARNLSDIDLMAPQPGV

SEQ ID NO: 3625 - protein, 93 aa, Homo sapiens
  MISC_FEATURE (51): Xaa equals any of the twenty naturally occurring L-amino acids
  MISC_FEATURE (62): Xaa equals any of the twenty naturally occurring L-amino acids
  MISC_FEATURE (64): Xaa equals any of the twenty naturally occurring L-amino acids
  MISC_FEATURE (81): Xaa equals any of the twenty naturally occurring L-amino acids
  MISC_FEATURE (85): Xaa equals any of the twenty naturally occurring L-amino acids
AEGALNCTRLSLVLRHLLDTPSLRAERSPRPVPRDKAQGRVYLGSRGGEGXEKAELESITLXTXSPNCWNSPAKCWEKDLXGESXLTSLYSQA

SEQ ID NO: 3626 - protein, 46 aa, Homo sapiens
  MISC_FEATURE (8): Xaa equals any of the twenty naturally occurring L-amino acids
  MISC_FEATURE (40): Xaa equals any of the twenty naturally occurring L-amino acids
FIYLGNKXMTFNGTILTYALTGQCLHFLIYLGIIFQKKNXSFKKLN

SEQ ID NO: 3627 - protein, 39 aa, Homo sapiens
FVDSLIIWCAALPQAQFYNQHYISITGRVCFNLQIERSK

SEQ ID NO: 3628 - protein, 86 aa, Homo sapiens
PDSDVLSEIMHSFAKCIEVMGDGCLNNEHFEELGGILKAKLEEHFKNQELRQVKRQDEDYFSIGITRPPEGEREIKLIFLVRHKEI

SEQ ID NO: 3629 - protein, 43 aa, Homo sapiens
DFSKMEPANSPVASRLLPGKESPPLPCSLMIMGGFIPPNKSVN

SEQ ID NO: 3630 - protein, 23 aa, Homo sapiens
  MISC_FEATURE (6): Xaa equals any of the twenty naturally occurring L-amino acids
  MISC_FEATURE (9): Xaa equals any of the twenty naturally occurring L-amino acids
  MISC_FEATURE (12): Xaa equals any of the twenty naturally occurring L-amino acids
  MISC_FEATURE (23): Xaa equals any of the twenty naturally occurring L-amino acids
AETPKXGYXSPXVQAYLLSLYFX

SEQ ID NO: 3631 - protein, 103 aa, Homo sapiens
  MISC_FEATURE (101): Xaa equals any of the twenty naturally occurring L-amino acids
  MISC_FEATURE (102): Xaa equals any of the twenty naturally occurring L-amino acids
  MISC_FEATURE (103): Xaa equals any of the twenty naturally occurring L-amino acids
TIITITDTCHLVSPLCFCCFFLSSLSLASFLSSILLLPSILPFSFSVAQPDIMSNASFSYNCLSFPLLKKKKKKAEQNSYDQGVFVSGEEGDGPCVKGVGXXX

SEQ ID NO: 3632 - protein, 55 aa, Homo sapiens
EILKNGIFGLNVKCIFKFYEELPYSYLKWLYHFIYLPPVYVSLVKSVQIFSSFLC

SEQ ID NO: 3633 - protein, 30 aa, Homo sapiens
  MISC_FEATURE (26): Xaa equals any of the twenty naturally occurring L-amino acids
NACTGNQKWINRVIGFKKTALHFCPXINFQ

SEQ ID NO: 3634 - protein, 105 aa, Homo sapiens
  MISC_FEATURE (2): Xaa equals any of the twenty naturally occurring L-amino acids
  MISC_FEATURE (74): Xaa equals any of the twenty naturally occurring L-amino acids
  MISC_FEATURE (77): Xaa equals any of the twenty naturally occurring L-amino acids
  MISC_FEATURE (88): Xaa equals any of the twenty naturally occurring L-amino acids
  MISC_FEATURE (92): Xaa equals any of the twenty naturally occurring L-amino acids
  MISC_FEATURE (100): Xaa equals any of the twenty naturally occurring L-amino acids
  MISC_FEATURE (103): Xaa equals any of the twenty naturally occurring L-amino acids
  MISC_FEATURE (104): Xaa equals any of the twenty naturally occurring L-amino acids
RXRVFPFYFWMLMTSISTGIGMDTCVIPLRHGGLSLVQTTDYIYPIVDDPYMMVSVSPMCFCDWKGLFGWVGLXPGXFDGILWGFGFXSGIXRLYWPNLXKFXXC

SEQ ID NO: 3635 - protein, 65 aa, Homo sapiens
AFTFSSSFRYHERTHTGEKPYQCKQCGKAFIPFTSFQCHERTHTGEKPYECILVPFDIMKGLTLE

SEQ ID NO: 3636 - protein, 143 aa, Homo sapiens
ESWLVLGRRKAGRLIGACGFEPPHFLTLDLEMHRDSCPLDCKVYVGNLGNNGNKTELELSNGEKRSRNRGPPPSWGRRPRDDYRRRSPPPRRRSPRRRSFSRSRSRSLSRDRRRERSLSRERNHKPSRSFSRSRSRSRSNERK

SEQ ID NO: 3637 - protein, 173 aa, Homo sapiens
DTLCSAVKPNLQVLRARFSEITPHAVRTACENLTEPDQRVSDAVDVRQELDLRIGAAFTRFQTLRLQRIFPEVLAEQLISYGSCQFPTLGFVVERFKAIQAFVPEIFHRIKVTHDHKDGIVEFNWKRHRLFNHTEKDHLCHFLKKQCNFNPESPCHQMVRNFISLLGTLHSQD

SEQ ID NO: 3638 - protein, 178 aa, Homo sapiens
HEHHKETEYKDKIPLLQQPKREEEEVLDQDFHMEEALDWPGVYLLPGQVSGVALDPKNNLVIFHRGDHVWDGNSFDSKFVYQQIGLGPIEEDTILVIDPNNAAVLQSSGKNLFYLPHGLSIDKDGNYWVTDVALHQVFKLDPNNKEGPVLILGRSMQPGSDQNHFCSIFVKWFSSEDL

SEQ ID NO: 3639 - protein, 143 aa, Homo sapiens
  MISC_FEATURE (14): Xaa equals any of the twenty naturally occurring L-amino acids
  MISC_FEATURE (73): Xaa equals any of the twenty naturally occurring L-amino acids
  MISC_FEATURE (96): Xaa equals any of the twenty naturally occurring L-amino acids
  MISC_FEATURE (100): Xaa equals any of the twenty naturally occurring L-amino acids
  MISC_FEATURE (132): Xaa equals any of the twenty naturally occurring L-amino acids
  MISC_FEATURE (133): Xaa equals any of the twenty naturally occurring L-amino acids
AIRTAIIEQVLVLXWAWSQWTWGACHLVRHELGQPRECLHQSPSPNFREHISQLWQTLLLLEEKREESKEDFXLQLGYQLNHSKIKAPRRSPKASXQGLXFWTTLLRPNPWGQKGNLVAFEKGKDPRPWRGXXNLGGIKEALW

SEQ ID NO: 3640 - protein, 108 aa, Homo sapiens
  MISC_FEATURE (16): Xaa equals any of the twenty naturally occurring L-amino acids
  MISC_FEATURE (20): Xaa equals any of the twenty naturally occurring L-amino acids
  MISC_FEATURE (30): Xaa equals any of the twenty naturally occurring L-amino acids
  MISC_FEATURE (60): Xaa equals any of the twenty naturally occurring L-amino acids
  MISC_FEATURE (70): Xaa equals any of the twenty naturally occurring L-amino acids
  MISC_FEATURE (73): Xaa equals any of the twenty naturally occurring L-amino acids
  MISC_FEATURE (84): Xaa equals any of the twenty naturally occurring L-amino acids
  MISC_FEATURE (86): Xaa equals any of the twenty naturally occurring L-amino acids
  MISC_FEATURE (88): Xaa equals any of the twenty naturally occurring L-amino acids
  MISC_FEATURE (91): Xaa equals any of the twenty naturally occurring L-amino acids
ETHILTLLGTEGEPRXAHRXALRVNKAATXVQQGPLSVTRHPLKIPATINPPEVHFRFLXGKGTKSGDLXRAXRPQGPWNPPSXSXPXQRXTLGPFKGNLGRKPKKPP

SEQ ID NO: 3641 - protein, 43 aa, Homo sapiens
  MISC_FEATURE (23): Xaa equals any of the twenty naturally occurring L-amino acids
  MISC_FEATURE (24): Xaa equals any of the twenty naturally occurring L-amino acids
  MISC_FEATURE (30): Xaa equals any of the twenty naturally occurring L-amino acids
  MISC_FEATURE (32): Xaa equals any of the twenty naturally occurring L-amino acids
  MISC_FEATURE (42): Xaa equals any of the twenty naturally occurring L-amino acids
SNSPQPPLLGFCDPPILAQRLQXXELSSLXPXPLVSTCGPRXL

SEQ ID NO: 3642 - protein, 59 aa, Homo sapiens
  MISC_FEATURE (12): Xaa equals any of the twenty naturally occurring L-amino acids
  MISC_FEATURE (26): Xaa equals any of the twenty naturally occurring L-amino acids
  MISC_FEATURE (37): Xaa equals any of the twenty naturally occurring L-amino acids
  MISC_FEATURE (48): Xaa equals any of the twenty naturally occurring L-amino acids
  MISC_FEATURE (51): Xaa equals any of the twenty naturally occurring L-amino acids
PVQRRLDTSIMXQKRSENIKQVEVWXILSKMNISGSXCGTLTLQIHLXTLXTLDKLKNV

SEQ ID NO: 3643 - protein, 54 aa, Homo sapiens
  MISC_FEATURE (1): Xaa equals any of the twenty naturally occurring L-amino acids
  MISC_FEATURE (3): Xaa equals any of the twenty naturally occurring L-amino acids
  MISC_FEATURE (5): Xaa equals any of the twenty naturally occurring L-amino acids
  MISC_FEATURE (18): Xaa equals any of the twenty naturally occurring L-amino acids
  MISC_FEATURE (20): Xaa equals any of the twenty naturally occurring L-amino acids
  MISC_FEATURE (22): Xaa equals any of the twenty naturally occurring L-amino acids
  MISC_FEATURE (26): Xaa equals any of the twenty naturally occurring L-amino acids
  MISC_FEATURE (30): Xaa equals any of the twenty naturally occurring L-amino acids
XKXPXAYCYNEIKLIKRXIXYXDILXEKCXEHSYHIFSVLWNLLTSLLIISSKT

SEQ ID NO: 3644 - protein, 49 aa, Homo sapiens
  MISC_FEATURE (12): Xaa equals any of the twenty naturally occurring L-amino acids
  MISC_FEATURE (30): Xaa equals any of the twenty naturally occurring L-amino acids
  MISC_FEATURE (35): Xaa equals any of the twenty naturally occurring L-amino acids
  MISC_FEATURE (43): Xaa equals any of the twenty naturally occurring L-amino acids
  MISC_FEATURE (45): Xaa equals any of the twenty naturally occurring L-amino acids
DDIAGVDKTACXRQEDGEKKFSKAGMGKCXPGLNXKGLYQPQXRXWTLC

SEQ ID NO: 3645 - protein, 88 aa, Homo sapiens
  MISC_FEATURE (33): Xaa equals any of the twenty naturally occurring L-amino acids
  MISC_FEATURE (35): Xaa equals any of the twenty naturally occurring L-amino acids
  MISC_FEATURE (43): Xaa equals any of the twenty naturally occurring L-amino acids
  MISC_FEATURE (48): Xaa equals any of the twenty naturally occurring L-amino acids
  MISC_FEATURE (54): Xaa equals any of the twenty naturally occurring L-amino acids
  MISC_FEATURE (69): Xaa equals any of the twenty naturally occurring L-amino acids
  MISC_FEATURE (77): Xaa equals any of the twenty naturally occurring L-amino acids
  MISC_FEATURE (78): Xaa equals any of the twenty naturally occurring L-amino acids
  MISC_FEATURE (79): Xaa equals any of the twenty naturally occurring L-amino acids
  MISC_FEATURE (83): Xaa equals any of the twenty naturally occurring L-amino acids
CLLITATLALILLEQASHSGVCYSFCLDCFSSXCXYSQLHFIXVLVPXPSNQSXYCLFAFSNFFMVLMXLIGIKLCXXXFVSXPLQKY

SEQ ID NO: 3646 - protein, 47 aa, Homo sapiens
  MISC_FEATURE (2): Xaa equals any of the twenty naturally occurring L-amino acids
  MISC_FEATURE (4): Xaa equals any of the twenty naturally occurring L-amino acids
  MISC_FEATURE (5): Xaa equals any of the twenty naturally occurring L-amino acids
  MISC_FEATURE (14): Xaa equals any of the twenty naturally occurring L-amino acids
  MISC_FEATURE (23): Xaa equals any of the twenty naturally occurring L-amino acids
  MISC_FEATURE (38): Xaa equals any of the twenty naturally occurring L-amino acids
  MISC_FEATURE (39): Xaa equals any of the twenty naturally occurring L-amino acids
  MISC_FEATURE (46): Xaa equals any of the twenty naturally occurring L-amino acids
  MISC_FEATURE (47): Xaa equals any of the twenty naturally occurring L-amino acids
IXLXXMLLDLEEQXRLQTKGIRXFYLGGSTSQSKAAFXXCFKHLVXX

SEQ ID NO: 3647 - protein, 44 aa, Homo sapiens
  MISC_FEATURE (2): Xaa equals any of the twenty naturally occurring L-amino acids
  MISC_FEATURE (3): Xaa equals any of the twenty naturally occurring L-amino acids
  MISC_FEATURE (9): Xaa equals any of the twenty naturally occurring L-amino acids
  MISC_FEATURE (11): Xaa equals any of the twenty naturally occurring L-amino acids
  MISC_FEATURE (18): Xaa equals any of the twenty naturally occurring L-amino acids
  MISC_FEATURE (25): Xaa equals any of the twenty naturally occurring L-amino acids
  MISC_FEATURE (27): Xaa equals any of the twenty naturally occurring L-amino acids
  MISC_FEATURE (37): Xaa equals any of the twenty naturally occurring L-amino acids
SXXKYACIXYXPCICFCXWKLNPGXNXLFTKQCLVKXLRFPILF

SEQ ID NO: 3648 - protein, 96 aa, Homo sapiens
SADLFTLKNKTKFKLQSKSSTFRETYGLFALNEGQEPAFSELAQRKFLKHRNVIIAGTWDVWNEISTFKKKRMKRIIIISQCIQFFWLMSNFTHQS

SEQ ID NO: 3649 - protein, 41 aa, Homo sapiens
VKEKKERQSISTIQWGQAGWGQKGKRMKSLDHFIYLPLHFP

SEQ ID NO: 3650 - protein, 31 aa, Homo sapiens
SLIITFTATELIIFYIFFETTLIPTLAIITR

SEQ ID NO: 3651 - protein, 45 aa, Homo sapiens
KKVKSVDLIALKETVYQGNHGVNFIAGFISASYSSLIIFYFFSPN

SEQ ID NO: 3652 - protein, 93 aa, Homo sapiens
  MISC_FEATURE (5): Xaa equals any of the twenty naturally occurring L-amino acids
  MISC_FEATURE (18): Xaa equals any of the twenty naturally occurring L-amino acids
  MISC_FEATURE (29): Xaa equals any of the twenty naturally occurring L-amino acids
  MISC_FEATURE (30): Xaa equals any of the twenty naturally occurring L-amino acids
  MISC_FEATURE (44): Xaa equals any of the twenty naturally occurring L-amino acids
  MISC_FEATURE (46): Xaa equals any of the twenty naturally occurring L-amino acids
  MISC_FEATURE (49): Xaa equals any of the twenty naturally occurring L-amino acids
  MISC_FEATURE (76): Xaa equals any of the twenty naturally occurring L-amino acids
  MISC_FEATURE (81): Xaa equals any of the twenty naturally occurring L-amino acids
  MISC_FEATURE (83): Xaa equals any of the twenty naturally occurring L-amino acids
  MISC_FEATURE (90): Xaa equals any of the twenty naturally occurring L-amino acids
  MISC_FEATURE (92): Xaa equals any of the twenty naturally occurring L-amino acids
FLRLXVLNSGIPLPPPQXFFGISPYCKTXXMSQVSHKGITALNXNXWWXAGAGNFGVLLMPAKTIYGLWWGAHRFXGGLDXKXLISLHPXIXP

SEQ ID NO: 3653 - protein, 36 aa, Homo sapiens
PVEIPLTKGNKSWSSTAVAAALELVDPPGCRNSARG

SEQ ID NO: 3654 - protein, 31 aa, Homo sapiens
RQQKLELHRGGGRSRTSGSPGLQEFGTRKGA

SEQ ID NO: 3655 - protein, 55 aa, Homo sapiens
  MISC_FEATURE (4): Xaa equals any of the twenty naturally occurring L-amino acids
  MISC_FEATURE (12): Xaa equals any of the twenty naturally occurring L-amino acids
GRGXPSRPRCDXPSKGNKSWSSTAVAAALELVDPPGCRNSARESNKNSDYLISDT

SEQ ID NO: 3656 - protein, 58 aa, Homo sapiens
  MISC_FEATURE (51): Xaa equals any of the twenty naturally occurring L-amino acids
KLSLVATLLMAFEFQVKTTAVVCICSGYINGNHMYICKHLMIVSSGVLAIXRLNYTLP

SEQ ID NO: 3657 - protein, 194 aa, Homo sapiens
  MISC_FEATURE (155): Xaa equals any of the twenty naturally occurring L-amino acids
  MISC_FEATURE (159): Xaa equals any of the twenty naturally occurring L-amino acids
  MISC_FEATURE (166): Xaa equals any of the twenty naturally occurring L-amino acids
  MISC_FEATURE (188): Xaa equals any of the twenty naturally occurring L-amino acids
  MISC_FEATURE (192): Xaa equals any of the twenty naturally occurring L-amino acids
KDGKGRTASPINSPARGTPSPKRMPSGRGGRDRFTAESYTVLGDTLIDGGEHYWEVRYEPDSKAFGVGVAYRSLGRFEQLGKTAASWCLHVNNWLQVSFTAKHANKVKVLDAPVPDCLGVHCDFHQGLLSFYNARTKQVLHTFKTRFTQPLLPAXTVWXWQLPGDXRPAGPQCCAAGCKKPRQVLPAXPTTXLT

SEQ ID NO: 3658 - protein, 67 aa, Homo sapiens
ISKTIKGFDSRFAFKKRQKFCLIFLSFCELVFLCMLRKFYTQGMFEKVRILECLGGFYLVSADVLGG

SEQ ID NO: 3659 - protein, 116 aa, Homo sapiens
  MISC_FEATURE (77): Xaa equals any of the twenty naturally occurring L-amino acids
  MISC_FEATURE (86): Xaa equals any of the twenty naturally occurring L-amino acids
  MISC_FEATURE (87): Xaa equals any of the twenty naturally occurring L-amino acids
  MISC_FEATURE (91): Xaa equals any of the twenty naturally occurring L-amino acids
  MISC_FEATURE (94): Xaa equals any of the twenty naturally occurring L-amino acids
  MISC_FEATURE (96): Xaa equals any of the twenty naturally occurring L-amino acids
  MISC_FEATURE (102): Xaa equals any of the twenty naturally occurring L-amino acids
  MISC_FEATURE (105): Xaa equals any of the twenty naturally occurring L-amino acids
  MISC_FEATURE (106): Xaa equals any of the twenty naturally occurring L-amino acids
VTTSLPTNLLSFHGEPSLLCRTNLPSFHGEPSLLCPTNLLSFHSKPSLLCLMGPFLDGVNTSDKVNPISCCQGPSCXLLGTWNSLXXRLEXKVXEXILFLPXLKXXNPLCLSVRAL

SEQ ID NO: 3660 - protein, 64 aa, Homo sapiens
VKHSSAIYLSRGFFSREPICPFEEKTKVERMVEDYLASGYQHLSGICSVLRSVLHRHQWDRKSS

SEQ ID NO: 3661 - protein, 66 aa, Homo sapiens
  MISC_FEATURE (13): Xaa equals any of the twenty naturally occurring L-amino acids
  MISC_FEATURE (19): Xaa equals any of the twenty naturally occurring L-amino acids
  MISC_FEATURE (45): Xaa equals any of the twenty naturally occurring L-amino acids
  MISC_FEATURE (52): Xaa equals any of the twenty naturally occurring L-amino acids
  MISC_FEATURE (63): Xaa equals any of the twenty naturally occurring L-amino acids
SLWGGEKELWGAXLSQPRXGGWGPGAPGFSFKEKLLRLGEFPPPXGGPFAKXVKFFPGANRKXFKF

SEQ ID NO: 3662 - protein, 41 aa, Homo sapiens
  MISC_FEATURE (3): Xaa equals any of the twenty naturally occurring L-amino acids
  MISC_FEATURE (8): Xaa equals any of the twenty naturally occurring L-amino acids
  MISC_FEATURE (23): Xaa equals any of the twenty naturally occurring L-amino acids
  MISC_FEATURE (27): Xaa equals any of the twenty naturally occurring L-amino acids
REXKLELXRGGGRSRTSGSPGLXEFGXRNKEQRQQIENSKK

SEQ ID NO: 3663 - protein, 50 aa, Homo sapiens
  MISC_FEATURE (16): Xaa equals any of the twenty naturally occurring L-amino acids
  MISC_FEATURE (24): Xaa equals any of the twenty naturally occurring L-amino acids
  MISC_FEATURE (44): Xaa equals any of the twenty naturally occurring L-amino acids
  MISC_FEATURE (45): Xaa equals any of the twenty naturally occurring L-amino acids
  MISC_FEATURE (49): Xaa equals any of the twenty naturally occurring L-amino acids
  MISC_FEATURE (50): Xaa equals any of the twenty naturally occurring L-amino acids
CTSIDSYCLHYASSLXRIYWYATXEEKIPVFKAASTLYICAPLXXHHLXX

SEQ ID NO: 3664 - protein, 60 aa, Homo sapiens
KLKGKNKGRNGGWEANHRVTGFWSPPGRNEKCNENYTTDFIFNLYSEEGKGIFDSRKNVL

SEQ ID NO: 3665 - protein, 52 aa, Homo sapiens
  MISC_FEATURE (29): Xaa equals any of the twenty naturally occurring L-amino acids
  MISC_FEATURE (39): Xaa equals any of the twenty naturally occurring L-amino acids
  MISC_FEATURE (40): Xaa equals any of the twenty naturally occurring L-amino acids
LTGLTVTSNLKQIAPCNGISKSILCIIAXTDRKSYTSKXXKFVLHYLTKLPE

SEQ ID NO: 3666 - protein, 118 aa, Homo sapiens
  MISC_FEATURE (23): Xaa equals any of the twenty naturally occurring L-amino acids
  MISC_FEATURE (30): Xaa equals any of the twenty naturally occurring L-amino acids
  MISC_FEATURE (40): Xaa equals any of the twenty naturally occurring L-amino acids
  MISC_FEATURE (59): Xaa equals any of the twenty naturally occurring L-amino acids
  MISC_FEATURE (66): Xaa equals any of the twenty naturally occurring L-amino acids
  MISC_FEATURE (78): Xaa equals any of the twenty naturally occurring L-amino acids
  MISC_FEATURE (82): Xaa equals any of the twenty naturally occurring L-amino acids
  MISC_FEATURE (83): Xaa equals any of the twenty naturally occurring L-amino acids
  MISC_FEATURE (103): Xaa equals any of the twenty naturally occurring L-amino acids
  MISC_FEATURE (107): Xaa equals any of the twenty naturally occurring L-amino acids
  MISC_FEATURE (108): Xaa equals any of the twenty naturally occurring L-amino acids
  MISC_FEATURE (112): Xaa equals any of the twenty naturally occurring L-amino acids
  MISC_FEATURE (115): Xaa equals any of the twenty naturally occurring L-amino acids
TKSLAYIFFHLLIIYPSLLKQCXLLCPVYXHLKQIAIIRXCLPFPSGNSLPWKSLSYPXKGEMGVXKGGLFGKTLHIXKLSXXKKIISFGTGGIPIPPLPVFXKFLXXKGLXKVXFGY

SEQ ID NO: 3667 - protein, 65 aa, Homo sapiens
  MISC_FEATURE (11): Xaa equals any of the twenty naturally occurring L-amino acids
  MISC_FEATURE (22): Xaa equals any of the twenty naturally occurring L-amino acids
  MISC_FEATURE (24): Xaa equals any of the twenty naturally occurring L-amino acids
  MISC_FEATURE (33): Xaa equals any of the twenty naturally occurring L-amino acids
  MISC_FEATURE (38): Xaa equals any of the twenty naturally occurring L-amino acids
  MISC_FEATURE (39): Xaa equals any of the twenty naturally occurring L-amino acids
  MISC_FEATURE (49): Xaa equals any of the twenty naturally occurring L-amino acids
  MISC_FEATURE (63): Xaa equals any of the twenty naturally occurring L-amino acids
FIIVIMDYPNXVIIHSTLLSPXEXNFFWVNPGXLEKIXXFSNLEKKDSXLVPSFSAPVLGKEXFF

SEQ ID NO: 3668 - protein, 168 aa, Homo sapiens
  MISC_FEATURE (147): Xaa equals any of the twenty naturally occurring L-amino acids
  MISC_FEATURE (159): Xaa equals any of the twenty naturally occurring L-amino acids
  MISC_FEATURE (162): Xaa equals any of the twenty naturally occurring L-amino acids
AGDWENRIAAGVGGPPKMGNTTSCCVSSSPKLRRNAHSRLESYRPDTDLSREDTGCNLQHISDRENIDDLNMEFNPSDHPRASTIFLSKSQTDVREKRKSLFINHVYLERLLTYAEIDICPANWKRIVLGAILLAFKVWDDQAVWNXDYWQILKTYGGXHEXARATGS

SEQ ID NO: 3669 - protein, 56 aa, Homo sapiens
VIIHRHFPGTNFKCQVLALLILSYHPVITGQNIHLRHGKGLSLKHDDIVSFLQQCN

SEQ ID NO: 3670 - protein, 44 aa, Homo sapiens
  MISC_FEATURE (41): Xaa equals any of the twenty naturally occurring L-amino acids
  MISC_FEATURE (43): Xaa equals any of the twenty naturally occurring L-amino acids
GTRGGPVPNSPYSESYYNSLAVVLQRRDWENPGLGKPTLSXSXF

SEQ ID NO: 3671 - protein, 64 aa, Homo sapiens
NCLAIQIELEGKVGSWLGSTEILDAYFHGFSVYKKRWYFWCSHYVNFAFVPLSRRLYNYLITPF

SEQ ID NO: 3672 - protein, 59 aa, Homo sapiens
  MISC_FEATURE (18): Xaa equals any of the twenty naturally occurring L-amino acids
  MISC_FEATURE (32): Xaa equals any of the twenty naturally occurring L-amino acids
  MISC_FEATURE (38): Xaa equals any of the twenty naturally occurring L-amino acids
MIKVTIQDKIGDIFPILXIRKVSIFVDISRAXAFLNLXKEFHIPMHLDYSRVERCIRYI

SEQ ID NO: 3673 - protein, 171 aa, Homo sapiens
  MISC_FEATURE (151): Xaa equals any of the twenty naturally occurring L-amino acids
  MISC_FEATURE (167): Xaa equals any of the twenty naturally occurring L-amino acids
  MISC_FEATURE (168): Xaa equals any of the twenty naturally occurring L-amino acids
  MISC_FEATURE (171): Xaa equals any of the twenty naturally occurring L-amino acids
SCRIRHEPDPNYVQASTYVQRAHLYSLRCAAEEKCLASTAYAPEATDYDVRVLLRFPQRVKNQGTADFLPNRPRHTWEWHSCHQHYHSMDEFSHYDLLDAATGKKVARATRPVSAWRTAPVTSATSSAMHAPLIPRLGWRRWGLGHGRIRXLGSKKRGPLSPGSAKXXALX

SEQ ID NO: 3674 - protein, 55 aa, Homo sapiens
DLSEIYFLIANEFPCLPKQVAWILATSKVFMYPELLPVCSLKAKNPQDKIVFTKA

SEQ ID NO: 3675 - protein, 73 aa, Homo sapiens
NFFFFFIFIRESHRTGWVYRNVQRPESVSDHMYRMAVMAMVIKDDRLNKDRKLSWTLMLVRDSGLWVCTRFYY

SEQ ID NO: 3676 - protein, 73 aa, Homo sapiens
YFYNLRELVRGWQPEKGIRPEAGQGIVMRGWKGHKVKVKQVDPGRTQPDSRTKLGSKFGLISFPYNVGLVGVG

SEQ ID NO: 3677 - protein, 56 aa, Homo sapiens
RLSQIREIKIPQGFCPKTARTKDAISRGAGLGKIIRSSVWGSLHLGCLTLDFRRTI

SEQ ID NO: 3678 - protein, 97 aa, Homo sapiens
  MISC_FEATURE (92): Xaa equals any of the twenty naturally occurring L-amino acids
EKWEDAQQIYPGSIELMQVIEDFIHIVGMGMMDFQNSYLMTGNVVASIQKLPAASVLTDINFPMKGRKGMVDWARNSEDRVVIPKSIFTSGXFKRIR

SEQ ID NO: 3679 - protein, 38 aa, Homo sapiens
  MISC_FEATURE (2): Xaa equals any of the twenty naturally occurring L-amino acids
  MISC_FEATURE (31): Xaa equals any of the twenty naturally occurring L-amino acids
  MISC_FEATURE (33): Xaa equals any of the twenty naturally occurring L-amino acids
  MISC_FEATURE (34): Xaa equals any of the twenty naturally occurring L-amino acids
  MISC_FEATURE (35): Xaa equals any of the twenty naturally occurring L-amino acids
RXEIVAPSQDPCTGETLPGQDGGVGVPSTLXLXXXSLL

SEQ ID NO: 3680 - protein, 85 aa, Homo sapiens
  MISC_FEATURE (75): Xaa equals any of the twenty naturally occurring L-amino acids
RLTRFLFNKPTQDSSGMTLVMLAAAGGQDDLLRLLITKGAKVNGRQKNGTTRLIHAAEKNFLTTVAILLEAGAFXNVQQSNGETA

SEQ ID NO: 3681 - protein, 188 aa, Homo sapiens
  MISC_FEATURE (140): Xaa equals any of the twenty naturally occurring L-amino acids
  MISC_FEATURE (166): Xaa equals any of the twenty naturally occurring L-amino acids
  MISC_FEATURE (177): Xaa equals any of the twenty naturally occurring L-amino acids
  MISC_FEATURE (179): Xaa equals any of the twenty naturally occurring L-amino acids
  MISC_FEATURE (188): Xaa equals any of the twenty naturally occurring L-amino acids
QLSAPASCSCTMKVLLCDLLLLSLFSSVFSSCQRDCLTCQEKLHPALDSFDLEVCILECEEKVFPSPLWTPCTKVMARSSWQLSPAAPEHVAAALYQPRASEMQHLRRMPRVRSLFQEQEEPEPGMEEAGEMEHKQLQKXFGGFTGARKSARKLANQKRFSEFMRXYLVLSMQSSQXPXHLGPKMGVX

SEQ ID NO: 3682 - protein, 81 aa, Homo sapiens
  MISC_FEATURE (3): Xaa equals any of the twenty naturally occurring L-amino acids
  MISC_FEATURE (6): Xaa equals any of the twenty naturally occurring L-amino acids
  MISC_FEATURE (10): Xaa equals any of the twenty naturally occurring L-amino acids
  MISC_FEATURE (15): Xaa equals any of the twenty naturally occurring L-amino acids
  MISC_FEATURE (24): Xaa equals any of the twenty naturally occurring L-amino acids
  MISC_FEATURE (26): Xaa equals any of the twenty naturally occurring L-amino acids
  MISC_FEATURE (36): Xaa equals any of the twenty naturally occurring L-amino acids
  MISC_FEATURE (46): Xaa equals any of the twenty naturally occurring L-amino acids
  MISC_FEATURE (62): Xaa equals any of the twenty naturally occurring L-amino acids
  MISC_FEATURE (68): Xaa equals any of the twenty naturally occurring L-amino acids
  MISC_FEATURE (75): Xaa equals any of the twenty naturally occurring L-amino acids
  MISC_FEATURE (76): Xaa equals any of the twenty naturally occurring L-amino acids
  MISC_FEATURE (77): Xaa equals any of the twenty naturally occurring L-amino acids
  MISC_FEATURE (81): Xaa equals any of the twenty naturally occurring L-amino acids
KPXTIXKLPXLMAGXKSCSPKIRXFXINFLKGLKTXPLGQLILKPXGKKRTTRLGFFEKSLXGSFKPXKKIFRKXXXKKWX

SEQ ID NO: 3683 - protein, 114 aa, Homo sapiens
LDADMNIKIADFGFSNEFTVGGKLDTFCGSPPYAAPELFQGKKYDGPEVDVWSLGVILYTLVSGSLPFDGQNLKELRERVLRGKYRIPFYMSTDCENLLKRFLVLNPIKRGSEL

SEQ ID NO: 3684 - protein, 48 aa, Homo sapiens
  MISC_FEATURE (12): Xaa equals any of the twenty naturally occurring L-amino acids
  MISC_FEATURE (19): Xaa equals any of the twenty naturally occurring L-amino acids
  MISC_FEATURE (45): Xaa equals any of the twenty naturally occurring L-amino acids
LMGEYVASRGLXKVGWGSXTYCRDAHIYFFQILSLYSRGFFGRKXSTA

SEQ ID NO: 3685 - protein, 53 aa, Homo sapiens
ACICIEHLWEDTEKCLTVCLRNRTEVFREWVVRKRDCTLHYIFVLSACIFLTM

SEQ ID NO: 3686 - protein, 162 aa, Homo sapiens
  MISC_FEATURE (5): Xaa equals any of the twenty naturally occurring L-amino acids
  MISC_FEATURE (9): Xaa equals any of the twenty naturally occurring L-amino acids
  MISC_FEATURE (19): Xaa equals any of the twenty naturally occurring L-amino acids
  MISC_FEATURE (43): Xaa equals any of the twenty naturally occurring L-amino acids
  MISC_FEATURE (62): Xaa equals any of the twenty naturally occurring L-amino acids
  MISC_FEATURE (77): Xaa equals any of the twenty naturally occurring L-amino acids
  MISC_FEATURE (81): Xaa equals any of the twenty naturally occurring L-amino acids
  MISC_FEATURE (98): Xaa equals any of the twenty naturally occurring L-amino acids
  MISC_FEATURE (109): Xaa equals any of the twenty naturally occurring L-amino acids
  MISC_FEATURE (112): Xaa equals any of the twenty naturally occurring L-amino acids
  MISC_FEATURE (124): Xaa equals any of the twenty naturally occurring L-amino acids
  MISC_FEATURE (130): Xaa equals any of the twenty naturally occurring L-amino acids
  MISC_FEATURE (134): Xaa equals any of the twenty naturally occurring L-amino acids
  MISC_FEATURE (157): Xaa equals any of the twenty naturally occurring L-amino acids
ESDKXLYMXSPRTVDEKLXGDTFSQMLGFPTPEPTLNTNFVNXKHFGSPQSSKHYQTVFLMXSNSTLNKHNENYKQXKLGXPSCNKLKNILDNGSNIXLSKICFLILKXSSXRSLYQIPRASAXKMDQIXWIQXYPKTLWRLKTTSKPVNGSRECPXDKVRC

SEQ ID NO: 3687 - protein, 44 aa, Homo sapiens
  MISC_FEATURE (11): Xaa equals any of the twenty naturally occurring L-amino acids
  MISC_FEATURE (14): Xaa equals any of the twenty naturally occurring L-amino acids
  MISC_FEATURE (20): Xaa equals any of the twenty naturally occurring L-amino acids
  MISC_FEATURE (21): Xaa equals any of the twenty naturally occurring L-amino acids
  MISC_FEATURE (31): Xaa equals any of the twenty naturally occurring L-amino acids
VIEPCFASALXFSXEAYLQXXTFGVVVVELXCYYRPLALTRVTV

SEQ ID NO: 3688 - protein, 57 aa, Homo sapiens
QKIMTEISSMRIQYSNSLANHLFQIDHIFVLSIQAANRIFACGKIHIQEYLEKKKPP

SEQ ID NO: 3689 - protein, 59 aa, Homo sapiens
QRCLPNQRYNSHLVPEDGTLTCSDPGICKYLCLGNALKPHVQLSACEVPLPPWIFGSEC

SEQ ID NO: 3690 - protein, 33 aa, Homo sapiens
YPYIVYFSRMCFISAMYSYCNKIHNHGLQTVYY

SEQ ID NO: 3691 - protein, 58 aa, Homo sapiens
  MISC_FEATURE (24): Xaa equals any of the twenty naturally occurring L-amino acids
LHCRLIFFCIHKRWKQESALTLGXHNISHTQQLLKQVGDLLLLHLTLLHRQPSFVKRA

SEQ ID NO: 3692 - protein, 71 aa, Homo sapiens
  MISC_FEATURE (10): Xaa equals any of the twenty naturally occurring L-amino acids
  MISC_FEATURE (15): Xaa equals any of the twenty naturally occurring L-amino acids
  MISC_FEATURE (30): Xaa equals any of the twenty naturally occurring L-amino acids
  MISC_FEATURE (61): Xaa equals any of the twenty naturally occurring L-amino acids
  MISC_FEATURE (66): Xaa equals any of the twenty naturally occurring L-amino acids
AHAVAASRLXIPGCXNSDEGVRVCELESPXLERPARDGGHRDRGRRSHGQAPASAAVGLTXLLALXGTSRS

SEQ ID NO: 3693 - protein, 48 aa, Homo sapiens
  MISC_FEATURE (6): Xaa equals any of the twenty naturally occurring L-amino acids
  MISC_FEATURE (9): Xaa equals any of the twenty naturally occurring L-amino acids
  MISC_FEATURE (10): Xaa equals any of the twenty naturally occurring L-amino acids
  MISC_FEATURE (20): Xaa equals any of the twenty naturally occurring L-amino acids
  MISC_FEATURE (33): Xaa equals any of the twenty naturally occurring L-amino acids
  MISC_FEATURE (41): Xaa equals any of the twenty naturally occurring L-amino acids
RHDRRXNIXXSVHTHTRELXWIIPSINPLKFKXQGKTPGKXPQFGKGF

SEQ ID NO: 3694 - protein, 138 aa, Homo sapiens
RERAEWLCGRVSETGSACSMADQLTEEQIAEFKEAFSLFDKDGDGTITTKELGTVMRSLGQNPTEAELQDMINEVDADGNGTIDFPEFLTMMARKMKDTDSEEEIREAFRVFDKDGNGYISAAELRHVMTNLGEKLTD

SEQ ID NO: 3695 - protein, 214 aa, Homo sapiens
  MISC_FEATURE (195): Xaa equals any of the twenty naturally occurring L-amino acids
DALGEEWKGYVVRISGGNDKQGFPMKQGVLTHGRVRLLLSKGHSCYRPRRTGERKRKSVRGCIVDANLSVLNLVIVKKGEKDIPGLTDTTVPRRLGPKRASRIRKLFNLSKEDDVRQYVVRKPLNKEGKKPRTKAPKIQRLGTPRVLQHKRRRIALKKQRTKKNKEEAAEYAKLLAKRMKEAKEKRQEQIAKRRXLSSLRASTSKSESVRNKNF

SEQ ID NO: 3696 - protein, 114 aa, Homo sapiens
FVFTKEDLTEIRDMLLANKVPAAARAGAIAPCEVTVPAQNTGLGPEKTSFFQALGITTKISRGTIEILSDVQLIKTGDKVGASEATLLNMLNISPFSFGLVIQQVFDNGKHLQP

SEQ ID NO: 3697 - protein, 54 aa, Homo sapiens
AVKVVMQSKNETRGNLEHSRYWEATSNGMLLGHQMDRRGMVEYEAKSQIMKALM

SEQ ID NO: 3698 - protein, 47 aa, Homo sapiens
  MISC_FEATURE (6): Xaa equals any of the twenty naturally occurring L-amino acids
  MISC_FEATURE (12): Xaa equals any of the twenty naturally occurring L-amino acids
  MISC_FEATURE (21): Xaa equals any of the twenty naturally occurring L-amino acids
  MISC_FEATURE (27): Xaa equals any of the twenty naturally occurring L-amino acids
  MISC_FEATURE (35): Xaa equals any of the twenty naturally occurring L-amino acids
  MISC_FEATURE (41): Xaa equals any of the twenty naturally occurring L-amino acids
PEPIGXKGLGNXNFKPCLKIXFEGTMXPGERTKWXGKGLQXGQEVIY

SEQ ID NO: 3699 - protein, 38 aa, Homo sapiens
  MISC_FEATURE (5): Xaa equals any of the twenty naturally occurring L-amino acids
  MISC_FEATURE (9): Xaa equals any of the twenty naturally occurring L-amino acids
  MISC_FEATURE (25): Xaa equals any of the twenty naturally occurring L-amino acids
  MISC_FEATURE (33): Xaa equals any of the twenty naturally occurring L-amino acids
  MISC_FEATURE (36): Xaa equals any of the twenty naturally occurring L-amino acids
  MISC_FEATURE (37): Xaa equals any of the twenty naturally occurring L-amino acids
LYIWXGALXLFSLIFKMKCCCLCMXFNHPAPTXLNXXS

SEQ ID NO: 3700 - protein, 70 aa, Homo sapiens
  MISC_FEATURE (8): Xaa equals any of the twenty naturally occurring L-amino acids
  MISC_FEATURE (12): Xaa equals any of the twenty naturally occurring L-amino acids
  MISC_FEATURE (20): Xaa equals any of the twenty naturally occurring L-amino acids
  MISC_FEATURE (23): Xaa equals any of the twenty naturally occurring L-amino acids
  MISC_FEATURE (47): Xaa equals any of the twenty naturally occurring L-amino acids
  MISC_FEATURE (50): Xaa equals any of the twenty naturally occurring L-amino acids
  MISC_FEATURE (51): Xaa equals any of the twenty naturally occurring L-amino acids
  MISC_FEATURE (54): Xaa equals any of the twenty naturally occurring L-amino acids
  MISC_FEATURE (58): Xaa equals any of the twenty naturally occurring L-amino acids
EWKIDEIXVLAXEQLCNLSXLLXQYKTLAYPFQSLLYLLLALNTISXFDXXDFXKYQXQTEIFWPWILQI

SEQ ID NO: 3701 - protein, 136 aa, Homo sapiens
  MISC_FEATURE (5): Xaa equals any of the twenty naturally occurring L-amino acids
  MISC_FEATURE (7): Xaa equals any of the twenty naturally occurring L-amino acids
  MISC_FEATURE (8): Xaa equals any of the twenty naturally occurring L-amino acids
  MISC_FEATURE (45): Xaa equals any of the twenty naturally occurring L-amino acids
PAVLXEXXLCEKMAQFDAKKFAETQPKKDTPRKEKGSREEKQKPXAERKEEKKAAAPAPEEEMDECEQALAAEPKAKDPFAHLPKSTFVLDEFKRKYSNEDTLSVALPYFWEHFDKDGWSLWYSEYRFLKNSLRPS

SEQ ID NO: 3702 - protein, 103 aa, Homo sapiens
  MISC_FEATURE (19): Xaa equals any of the twenty naturally occurring L-amino acids
  MISC_FEATURE (20): Xaa equals any of the twenty naturally occurring L-amino acids
  MISC_FEATURE (77): Xaa equals any of the twenty naturally occurring L-amino acids
  MISC_FEATURE (94): Xaa equals any of the twenty naturally occurring L-amino acids
  MISC_FEATURE (95): Xaa equals any of the twenty naturally occurring L-amino acids
  MISC_FEATURE (99): Xaa equals any of the twenty naturally occurring L-amino acids
  MISC_FEATURE (100): Xaa equals any of the twenty naturally occurring L-amino acids
  MISC_FEATURE (101): Xaa equals any of the twenty naturally occurring L-amino acids
AFPSGFPLPHCGSPVGACXXNSALRLSKAPGKMVENSPSPLPERAIYGFVLFLSSQFGFILYLVWAFIPESWLKLFXFNLLASKNIGALALPVXXPYCXXXLG

SEQ ID NO: 3703 - protein, 133 aa, Homo sapiens
PTRPGMAMAEGERTECAEPPRDEPPADGALKRAEELKTQANDYFKAKDYENAIKFYSQAIELNPSNAIYYGNRSLAYLRTECYGYALADATRAIEIDKKYIKGYYRRAASNMALGKFRAALRDLRDGGESEAP

SEQ ID NO: 3704 - protein, 61 aa, Homo sapiens
  MISC_FEATURE (1): Xaa equals any of the twenty naturally occurring L-amino acids
  MISC_FEATURE (7): Xaa equals any of the twenty naturally occurring L-amino acids
  MISC_FEATURE (8): Xaa equals any of the twenty naturally occurring L-amino acids
  MISC_FEATURE (11): Xaa equals any of the twenty naturally occurring L-amino acids
  MISC_FEATURE (13): Xaa equals any of the twenty naturally occurring L-amino acids
  MISC_FEATURE (27): Xaa equals any of the twenty naturally occurring L-amino acids
  MISC_FEATURE (28): Xaa equals any of the twenty naturally occurring L-amino acids
  MISC_FEATURE (37): Xaa equals any of the twenty naturally occurring L-amino acids
  MISC_FEATURE (38): Xaa equals any of the twenty naturally occurring L-amino acids
  MISC_FEATURE (42): Xaa equals any of the twenty naturally occurring L-amino acids
  MISC_FEATURE (50): Xaa equals any of the twenty naturally occurring L-amino acids
  MISC_FEATURE (55): Xaa equals any of the twenty naturally occurring L-amino acids
  MISC_FEATURE (60): Xaa equals any of the twenty naturally occurring L-amino acids
XVIVMIXXSVXKXDAWTGDVLVAALLXXPLVLVRKLXXERRXRVRGGCYXYCGIXDGLKXV

SEQ ID NO: 3705 - protein, 45 aa, Homo sapiens
NFGSLLGICLILQILTGLFLAIHYTSDTATAFSSVTHICRDVNYG

SEQ ID NO: 3706 - protein, 132 aa, Homo sapiens
  MISC_FEATURE (41): Xaa equals any of the twenty naturally occurring L-amino acids
  MISC_FEATURE (49): Xaa equals any of the twenty naturally occurring L-amino acids
  MISC_FEATURE (60): Xaa equals any of the twenty naturally occurring L-amino acids
  MISC_FEATURE (68): Xaa equals any of the twenty naturally occurring L-amino acids
  MISC_FEATURE (75): Xaa equals any of the twenty naturally occurring L-amino acids
  MISC_FEATURE (117): Xaa equals any of the twenty naturally occurring L-amino acids
  MISC_FEATURE (125): Xaa equals any of the twenty naturally occurring L-amino acids
  MISC_FEATURE (126): Xaa equals any of the twenty naturally occurring L-amino acids
  MISC_FEATURE (130): Xaa equals any of the twenty naturally occurring L-amino acids
  MISC_FEATURE (132): Xaa equals any of the twenty naturally occurring L-amino acids
RPTRPPTRPPTRPGKFNPICKASGWPLPANEEMTLVKPDGXVLHPKDFXLTSHLSVATFXIHRILPPXSGVWVCXVNTVAWMVEKPFNISVKVLPEPLNAPNVNDTGLNFAGHQHQXEPYFGEWXXPNPXKX

SEQ ID NO: 3707 - protein, 54 aa, Homo sapiens
STHGVRQRWKEKEKTETKAPVQHFSRPHQVTLLARLPSPSGLPSSVLLFCCCNF

SEQ ID NO: 3708 - protein, 68 aa, Homo sapiens
  MISC_FEATURE (30): Xaa equals any of the twenty naturally occurring L-amino acids
  MISC_FEATURE (32): Xaa equals any of the twenty naturally occurring L-amino acids
  MISC_FEATURE (39): Xaa equals any of the twenty naturally occurring L-amino acids
  MISC_FEATURE (53): Xaa equals any of the twenty naturally occurring L-amino acids
GIDPRVRSSVDWRQADAGARGSVASSEIRXLXNSVATMXSRLFRMHGLFVASXPWEVIVGTVHTVPSV

SEQ ID NO: 3709 - protein, 85 aa, Homo sapiens
  MISC_FEATURE (24): Xaa equals any of the twenty naturally occurring L-amino acids
  MISC_FEATURE (80): Xaa equals any of the twenty naturally occurring L-amino acids
NTSGTMAEGDNRSTNLLAAETASXEEQLQGWGEVMLMADKVLRWEKAWFPPGHHGCGFFGVSDYLLSRSICSVRCFLFCXVFVLG

SEQ ID NO: 3710 - protein, 141 aa, Homo sapiens
  MISC_FEATURE (21): Xaa equals any of the twenty naturally occurring L-amino acids
  MISC_FEATURE (86): Xaa equals any of the twenty naturally occurring L-amino acids
  MISC_FEATURE (88): Xaa equals any of the twenty naturally occurring L-amino acids
  MISC_FEATURE (90): Xaa equals any of the twenty naturally occurring L-amino acids
  MISC_FEATURE (95): Xaa equals any of the twenty naturally occurring L-amino acids
  MISC_FEATURE (99): Xaa equals any of the twenty naturally occurring L-amino acids
  MISC_FEATURE (121): Xaa equals any of the twenty naturally occurring L-amino acids
  MISC_FEATURE (123): Xaa equals any of the twenty naturally occurring L-amino acids
  MISC_FEATURE (140): Xaa equals any of the twenty naturally occurring L-amino acids
GSTHASGEGQAPTRQAALGAXLSISTPCTTVNKVCASGMKAIMMASQNLMCGHQDVMVAGGMESMSNVPYVMSRGATPYGGVKLEXLXVXNWLTXFYHXFLLGDCAENTAKKMNIAREEQXHXRLTPTPGVKQRGKQGIXE

SEQ ID NO: 3711 - protein, 80 aa, Homo sapiens
EEELIWPLSSPPRGFVFSRRAGYSYFLRIMADKLTRIAIVNHDKCKPKKCRQECKKSCPVVRMGKLCIEVTPQSKIAWDF

SEQ ID NO: 3712 - protein, 88 aa, Homo sapiens
  MISC_FEATURE (6): Xaa equals any of the twenty naturally occurring L-amino acids
  MISC_FEATURE (55): Xaa equals any of the twenty naturally occurring L-amino acids
STHASXGGKWRQGSKRRPRWRRRRPKWRRRAAPRRAKRQRGSGPKCIGERPTQNXKRKEKNIKRGGNRFEPYANPTKRYRAFIDKHTF

SEQ ID NO: 3713 - protein, 123 aa, Homo sapiens
  MISC_FEATURE (10): Xaa equals any of the twenty naturally occurring L-amino acids
  MISC_FEATURE (11): Xaa equals any of the twenty naturally occurring L-amino acids
STHASGELAXXGLTVFLQLSSVFGKRSGAGGICFSPSRFGRMKVITCEIAWHNKEPVYSLDFQPGAAAGIHRLASAGVDTAVQDLEVAKGPDGKAIVEFLSNLTRHTKAVQCRAVFLPNWGKF

SEQ ID NO: 3714 - protein, 98 aa, Homo sapiens
  MISC_FEATURE (62): Xaa equals any of the twenty naturally occurring L-amino acids
  MISC_FEATURE (68): Xaa equals any of the twenty naturally occurring L-amino acids
  MISC_FEATURE (97): Xaa equals any of the twenty naturally occurring L-amino acids
DPRVRNDDPLPSSVEASRPLPPGGCWAQQQGFGAMLGRPSGASPNILGDQIYLMVKGLVQAXTARALXRASGALTRPCIYSRTGVRGVRNLHRWAQXW

SEQ ID NO: 3715 - protein, 160 aa, Homo sapiens
  MISC_FEATURE (114): Xaa equals any of the twenty naturally occurring L-amino acids
  MISC_FEATURE (116): Xaa equals any of the twenty naturally occurring L-amino acids
  MISC_FEATURE (122): Xaa equals any of the twenty naturally occurring L-amino acids
  MISC_FEATURE (124): Xaa equals any of the twenty naturally occurring L-amino acids
  MISC_FEATURE (137): Xaa equals any of the twenty naturally occurring L-amino acids
  MISC_FEATURE (141): Xaa equals any of the twenty naturally occurring L-amino acids
  MISC_FEATURE (148): Xaa equals any of the twenty naturally occurring L-amino acids
  MISC_FEATURE (153): Xaa equals any of the twenty naturally occurring L-amino acids
  MISC_FEATURE (160): Xaa equals any of the twenty naturally occurring L-amino acids
RPTRPPTRPALCLFDVDGTLTAPRQKITKEMDGFLQNLRQKIKIGVVGGSDFEKVQEQLGKDVVEKYDYVFPENGLVAYKDGKLLCKQSIQGHLGEALIQDLINLLSGATLARXKXPKKRGXSXGVSETGCWNVFPXWGEXAFKKNAXDFPRXPIKKENX

SEQ ID NO: 3716 - protein, 140 aa, Homo sapiens
  MISC_FEATURE (119): Xaa equals any of the twenty naturally occurring L-amino acids
  MISC_FEATURE (124): Xaa equals any of the twenty naturally occurring L-amino acids
  MISC_FEATURE (137): Xaa equals any of the twenty naturally occurring L-amino acids
RPTRPAETLLSSLLWLLLLGILLPASLTGGVGSLNLEELSEMRYGIEILPLPVMGGQSQASDVVIVSSKYKQRYECRLPAGAIHFQREREEEAPAYRGPGIPELLSPMKDAPCLLKTKXWWTYXSVMDATFSITTGXFRD

SEQ ID NO: 3717 - protein, 121 aa, Homo sapiens
  MISC_FEATURE (118): Xaa equals any of the twenty naturally occurring L-amino acids
  MISC_FEATURE (119): Xaa equals any of the twenty naturally occurring L-amino acids
RPVRSHRSSCEGEAEWTAFLEQLLILRCHRELRTKAELYHLEEWEANASVDMFSKVLENQLLQTTKLVEEHLDSEIQKLDQMDEDELERLKEKRLEALRKAQQQKQEWLSKRTGGIQXXPQ

SEQ ID NO: 3718 - protein, 62 aa, Homo sapiens
GSTHASAHTELAPLRAPLIPMEHCTTRFFETCDLDHDKYIALDEWAGCFGIKEKDIDKDLVI

SEQ ID NO: 3719 - protein, 77 aa, Homo sapiens
RPTRPGFGSKVTTHPLAKDKMMKGSHYSYSENRVERDGLILTSRGPGTSFEFALAIVEALNGKDVADQVKAPLVLKD

SEQ ID NO: 3720 - protein, 151 aa, Homo sapiens
  MISC_FEATURE (16): Xaa equals any of the twenty naturally occurring L-amino acids
  MISC_FEATURE (145): Xaa equals any of the twenty naturally occurring L-amino acids
STHASALACKYNGKDXVCLTLYGDGAANQGQIFEAYNMAALWKLPCIFICENNRYGMGTSVERAAASTDYYKRGDFIPGLRVDGMDVLCVREATRFAAAYCRSGKGPILMELQTYRYHGHSMSDPGVSYRTREEISGSKELRVTXFMLLQG

SEQ ID NO: 3721 - protein, 227 aa, Homo sapiens
  MISC_FEATURE (127): Xaa equals any of the twenty naturally occurring L-amino acids
  MISC_FEATURE (131): Xaa equals any of the twenty naturally occurring L-amino acids
  MISC_FEATURE (133): Xaa equals any of the twenty naturally occurring L-amino acids
  MISC_FEATURE (134): Xaa equals any of the twenty naturally occurring L-amino acids
  MISC_FEATURE (136): Xaa equals any of the twenty naturally occurring L-amino acids
  MISC_FEATURE (139): Xaa equals any of the twenty naturally occurring L-amino acids
  MISC_FEATURE (140): Xaa equals any of the twenty naturally occurring L-amino acids
  MISC_FEATURE (142): Xaa equals any of the twenty naturally occurring L-amino acids
  MISC_FEATURE (144): Xaa equals any of the twenty naturally occurring L-amino acids
  MISC_FEATURE (145): Xaa equals any of the twenty naturally occurring L-amino acids
  MISC_FEATURE (146): Xaa equals any of the twenty naturally occurring L-amino acids
  MISC_FEATURE (147): Xaa equals any of the twenty naturally occurring L-amino acids
  MISC_FEATURE (148): Xaa equals any of the twenty naturally occurring L-amino acids
  MISC_FEATURE (152): Xaa equals any of the twenty naturally occurring L-amino acids
  MISC_FEATURE (158): Xaa equals any of the twenty naturally occurring L-amino acids
  MISC_FEATURE (159): Xaa equals any of the twenty naturally occurring L-amino acids
  MISC_FEATURE (160): Xaa equals any of the twenty naturally occurring L-amino acids
  MISC_FEATURE (161): Xaa equals any of the twenty naturally occurring L-amino acids
  MISC_FEATURE (164): Xaa equals any of the twenty naturally occurring L-amino acids
  MISC_FEATURE (169): Xaa equals any of the twenty naturally occurring L-amino acids
  MISC_FEATURE (170): Xaa equals any of the twenty naturally occurring L-amino acids
  MISC_FEATURE (179): Xaa equals any of the twenty naturally occurring L-amino acids
  MISC_FEATURE (190): Xaa equals any of the twenty naturally occurring L-amino acids
  MISC_FEATURE (203): Xaa equals any of the twenty naturally occurring L-amino acids
  MISC_FEATURE (204): Xaa equals any of the twenty naturally occurring L-amino acids
  MISC_FEATURE (216): Xaa equals any of the twenty naturally occurring L-amino acids
  MISC_FEATURE (223): Xaa equals any of the twenty naturally occurring L-amino acids
SFSAPCRTSVRFSLLASTPASTPASTMSVRVTQKSYKVSTSGPRAFSSRSYTSGPGSRISSSAFSRVGGSFRGGLNSSMSVVGGYGGGAGGMGGITAVSVNQSLLSPLKLEVDPNIQAVRTQEKEQXKNLXNXXGXGKXXGXGXXXXXKKVXETKGSXXXXKKXGGEHXXKVERYIRTXGGVGTWQKSEXEGSWKRGWGGLEXXGEIKGELERLLXRGSMKEXAPSA

SEQ ID NO: 3722 - protein, 115 aa, Homo sapiens
  MISC_FEATURE (6): Xaa equals any of the twenty naturally occurring L-amino acids
  MISC_FEATURE (7): Xaa equals any of the twenty naturally occurring L-amino acids
  MISC_FEATURE (109): Xaa equals any of the twenty naturally occurring L-amino acids
  MISC_FEATURE (110): Xaa equals any of the twenty naturally occurring L-amino acids
STHASXXHSCTSGSGSGLPFLVQRTVARQITLLECVGKGRYGEVWRGSWQGENVAVKIFSSRDEKSWFRETELYNTVMLRHENILGFIASDMTSRHSSTQLWLITHYHXXGSLYD

SEQ ID NO: 3723 - protein, 108 aa, Homo sapiens
DPRVRENLMDAQVKAIADTGANVIVTGGKVADMALHYANKYNIMLVRLNSKWDLRRLCKTVGATALPRLTPPVLEEMGHCGQCLPLRSWETHRWWFLSMKRKMVPFLP

SEQ ID NO: 3724 - protein, 117 aa, Homo sapiens
  MISC_FEATURE (27): Xaa equals any of the twenty naturally occurring L-amino acids
  MISC_FEATURE (84): Xaa equals any of the twenty naturally occurring L-amino acids
  MISC_FEATURE (99): Xaa equals any of the twenty naturally occurring L-amino acids
  MISC_FEATURE (106): Xaa equals any of the twenty naturally occurring L-amino acids
  MISC_FEATURE (110): Xaa equals any of the twenty naturally occurring L-amino acids
  MISC_FEATURE (116): Xaa equals any of the twenty naturally occurring L-amino acids
STHASGRARCRHAAPRSALPGPGRADXGAPPPGGGGPRLVLNKGNFEEALAAHKYLLVEFYAPWCGHCKLWPPSTPNCWELKQXVRRSAGQSRCHGRSXLAQHMAXWLPXINSSRXG

SEQ ID NO: 3725 - protein, 53 aa, Homo sapiens
ADSPKYITTQVDLSCYIQKPTSVQSSPESTYSAPTVPTYKLKLPLIHLLSRKA

SEQ ID NO: 3726 - protein, 59 aa, Homo sapiens
  MISC_FEATURE (54): Xaa equals any of the twenty naturally occurring L-amino acids
  MISC_FEATURE (55): Xaa equals any of the twenty naturally occurring L-amino acids
  MISC_FEATURE (57): Xaa equals any of the twenty naturally occurring L-amino acids
  MISC_FEATURE (59): Xaa equals any of the twenty naturally occurring L-amino acids
VTFSQTATAIMILGLPRASKSIAHKINFLLQFPPTPKPKVSVLCPCASLGFSTXXFXRX

SEQ ID NO: 3727 - protein, 109 aa, Homo sapiens
  MISC_FEATURE (52): Xaa equals any of the twenty naturally occurring L-amino acids
  MISC_FEATURE (54): Xaa equals any of the twenty naturally occurring L-amino acids
  MISC_FEATURE (66): Xaa equals any of the twenty naturally occurring L-amino acids
  MISC_FEATURE (80): Xaa equals any of the twenty naturally occurring L-amino acids
  MISC_FEATURE (102): Xaa equals any of the twenty naturally occurring L-amino acids
VRRGHRVAAAVLLRDPRGPRSHVPCCELSRCASLAGGSGGRFKWHLYKQVRXRXSICARSVKSHCXLKGPPKEGDEHQKXFDHFPKIFLKIFSPVPMKVLIXKTGVHRK

SEQ ID NO: 3728 - protein, 69 aa, Homo sapiens
  MISC_FEATURE (2): Xaa equals any of the twenty naturally occurring L-amino acids
  MISC_FEATURE (3): Xaa equals any of the twenty naturally occurring L-amino acids
  MISC_FEATURE (5): Xaa equals any of the twenty naturally occurring L-amino acids
  MISC_FEATURE (65): Xaa equals any of the twenty naturally occurring L-amino acids
QXXIXEDHIIGAYAEESYQEGKYASIILFALQDTKISEWKLGLCTPETLFCCDVTKYNSPTEFPXRWKK

SEQ ID NO: 3729 - protein, 120 aa, Homo sapiens
  MISC_FEATURE (3): Xaa equals any of the twenty naturally occurring L-amino acids
  MISC_FEATURE (65): Xaa equals any of the twenty naturally occurring L-amino acids
AQXAGLRVSLSTASGWGPPGAELRSMQDVVEDFKNKYEDEINHRTAAENEFVVLKKDVDAAYMSXVELEAKVDALNDEINFLRTLNEDGVDRAAVPDLRHICGAVHGQQFAPWNLERHHR

SEQ ID NO: 3730 - protein, 50 aa, Homo sapiens
FCSDINLSDCFCALDNTTIHKLRFLVFGYLLDATKKIEMSFLFKAFDVVS

SEQ ID NO: 3731 - protein, 110 aa, Homo sapiens
  MISC_FEATURE (16): Xaa equals any of the twenty naturally occurring L-amino acids
  MISC_FEATURE (24): Xaa equals any of the twenty naturally occurring L-amino acids
  MISC_FEATURE (41): Xaa equals any of the twenty naturally occurring L-amino acids
  MISC_FEATURE (42): Xaa equals any of the twenty naturally occurring L-amino acids
  MISC_FEATURE (71): Xaa equals any of the twenty naturally occurring L-amino acids
  MISC_FEATURE (75): Xaa equals any of the twenty naturally occurring L-amino acids
  MISC_FEATURE (92): Xaa equals any of the twenty naturally occurring L-amino acids
  MISC_FEATURE (93): Xaa equals any of the twenty naturally occurring L-amino acids
  MISC_FEATURE (97): Xaa equals any of the twenty naturally occurring L-amino acids
  MISC_FEATURE (103): Xaa equals any of the twenty naturally occurring L-amino acids
  MISC_FEATURE (106): Xaa equals any of the twenty naturally occurring L-amino acids
SWDIPELVNMGQWKIXAYYENSPXQVFSTEFEVKEYVLPSXXVIVEPTEKFYYIYNEKGWRSPSPAGSSTXRKWXELALSSSGSKMANRGFXXLNPXSAFRLXMAXGKLC

SEQ ID NO: 3732 - protein, 157 aa, Homo sapiens
  MISC_FEATURE (2): Xaa equals any of the twenty naturally occurring L-amino acids
  MISC_FEATURE (3): Xaa equals any of the twenty naturally occurring L-amino acids
  MISC_FEATURE (6): Xaa equals any of the twenty naturally occurring L-amino acids
  MISC_FEATURE (156): Xaa equals any of the twenty naturally occurring L-amino acids
  MISC_FEATURE (157): Xaa equals any of the twenty naturally occurring L-amino acids
NXXKPXWYIPDTIEGTPAGTGPEFPGRPTRPEYGRNQDFMNVYYQIRSSQLDRSIKGLKEHFHKSSSSSGVPYSPAIPNKRKDTPTKKPVKRPGRDDMLDVETDAYIHCVSAFVKLAQSEYQLLADIIPEHHQKKTFDSLIQDALEGLMLERENNXX

SEQ ID NO: 3733 - protein, 84 aa, Homo sapiens
  MISC_FEATURE (23): Xaa equals any of the twenty naturally occurring L-amino acids
  MISC_FEATURE (31): Xaa equals any of the twenty naturally occurring L-amino acids
  MISC_FEATURE (42): Xaa equals any of the twenty naturally occurring L-amino acids
  MISC_FEATURE (48): Xaa equals any of the twenty naturally occurring L-amino acids
  MISC_FEATURE (63): Xaa equals any of the twenty naturally occurring L-amino acids
  MISC_FEATURE (73): Xaa equals any of the twenty naturally occurring L-amino acids
  MISC_FEATURE (77): Xaa equals any of the twenty naturally occurring L-amino acids
  MISC_FEATURE (79): Xaa equals any of the twenty naturally occurring L-amino acids
  MISC_FEATURE (81): Xaa equals any of the twenty naturally occurring L-amino acids
RLQVPVRNSRARCLLRSSCGSCXAGRPWQSXPRNGGSGVATXGWAAWXTSSWPMPAWCWAWAXLLVLGIANWXVKRXIXRXTSP

SEQ ID NO: 3734 - protein, 167 aa, Homo sapiens
  MISC_FEATURE (127): Xaa equals any of the twenty naturally occurring L-amino acids
  MISC_FEATURE (146): Xaa equals any of the twenty naturally occurring L-amino acids
  MISC_FEATURE (152): Xaa equals any of the twenty naturally occurring L-amino acids
  MISC_FEATURE (153): Xaa equals any of the twenty naturally occurring L-amino acids
  MISC_FEATURE (156): Xaa equals any of the twenty naturally occurring L-amino acids
  MISC_FEATURE (167): Xaa equals any of the twenty naturally occurring L-amino acids
GLIERTIEDHELVIEVLSNWGIEEENKLYFRKNYAKYEFFKNPMYFFPEHMVSFATETNGEISPTQILQMFLSSSTYPEIHGFLHAKEQGKKSWKKIYFFLRRSGLYFSTKGTSKEPRHLQFFSEFXNSDIYVSLGRQKKHGAPTXYGFCFXXLPXRYALPINNGPX

SEQ ID NO: 3735 - protein, 47 aa, Homo sapiens
  MISC_FEATURE (7): Xaa equals any of the twenty naturally occurring L-amino acids
VDPRVRXCVWVWMFMKSDLVLFINIHTHTHAEWRAKCKTKSDFIRAF

SEQ ID NO: 3736 - protein, 162 aa, Homo sapiens
STHASGGAALREGRFRGATCRATLQSRHLCSRAPVRAGAGGVVGTPGGRRGTFQKVPHRKRLPRPELGAGAETRRTWDPGLRELGSCRSLFKRYFFGGGTRIKFSVGAFLRVLFKRPEVRSSSAGLSLLLVPTPQNPGRTTPSPAGQSFYGRRVSPSKVLRR

SEQ ID NO: 3737 - protein, 61 aa, Homo sapiens
STHASAHASGTLNHQYDYTFDWTMLKQKAAQQAASSSGQGQQAQTPTGKQTDKTKSNMKGF

SEQ ID NO: 3738 - protein, 147 aa, Homo sapiens
  MISC_FEATURE (84): Xaa equals any of the twenty naturally occurring L-amino acids
  MISC_FEATURE (91): Xaa equals any of the twenty naturally occurring L-amino acids
  MISC_FEATURE (106): Xaa equals any of the twenty naturally occurring L-amino acids
  MISC_FEATURE (134): Xaa equals any of the twenty naturally occurring L-amino acids
  MISC_FEATURE (137): Xaa equals any of the twenty naturally occurring L-amino acids
CSLTLLFFLLLAAQVLLVEGKKKVKNGLHSKVVSEQKDTLGNTQIKQKSRPGNKGKFVTKDQANCRWAATEQEEGISLKVECTXLDHEFFXVFAGNPTSCLKLKDXRVYWKQVARNLRSQKDICRYSKTACENXNVXERIFQNPVLS

SEQ ID NO: 3739 - protein, 164 aa, Homo sapiens
  MISC_FEATURE (116): Xaa equals any of the twenty naturally occurring L-amino acids
  MISC_FEATURE (118): Xaa equals any of the twenty naturally occurring L-amino acids
  MISC_FEATURE (120): Xaa equals any of the twenty naturally occurring L-amino acids
  MISC_FEATURE (121): Xaa equals any of the twenty naturally occurring L-amino acids
  MISC_FEATURE (123): Xaa equals any of the twenty naturally occurring L-amino acids
  MISC_FEATURE (125): Xaa equals any of the twenty naturally occurring L-amino acids
  MISC_FEATURE (126): Xaa equals any of the twenty naturally occurring L-amino acids
  MISC_FEATURE (130): Xaa equals any of the twenty naturally occurring L-amino acids
  MISC_FEATURE (132): Xaa equals any of the twenty naturally occurring L-amino acids
  MISC_FEATURE (141): Xaa equals any of the twenty naturally occurring L-amino acids
  MISC_FEATURE (147): Xaa equals any of the twenty naturally occurring L-amino acids
  MISC_FEATURE (153): Xaa equals any of the twenty naturally occurring L-amino acids
KLPLKAKMGKEKTHINIVVIGHVDSGKSTTTGHLIYKCGGIDKRTIEKFEKEAAEMGKGSFKYAWVLDKLKAERERGITIDISLWKFETSKYYVTIIDAPGHRDFIKNMITGTFKXTXLXXNXCXXLLGXFXLGISKNGAXPKHSLXVTTGCXTTNCGVNKWFP

SEQ ID NO: 3740 - protein, 78 aa, Homo sapiens
AKMGKEKTHINIVVIGHVDSGKSTTTGHLIYKCGGIDKRTIEKFEKEAAEMGKGSFKYAWVLDKLKAERERGITIDIS

SEQ ID NO: 3741 - protein, 112 aa, Homo sapiens
NILTNRSNAQRQDIAFAYQRRTKKELASALKSALSGHLETVILGLLKTPAQYDASELKASMKGLGTDEDSLIEIICSRTNQELQEINRSLQGNVKTDLEKDIISDTSGDSAS

SEQ ID NO: 3742 - protein, 86 aa, Homo sapiens
RDFEKNYNMYIFPVHWQFGQLDQHPIDGYLSHTELAPLRAPLIPMEHCTTRFFETCDLDNDKYIALDEWAGCFGIKQKDIDKDLVI

SEQ ID NO: 3743 - protein, 50 aa, Homo sapiens
  MISC_FEATURE (5): Xaa equals any of the twenty naturally occurring L-amino acids
  MISC_FEATURE (13): Xaa equals any of the twenty naturally occurring L-amino acids
  MISC_FEATURE (16): Xaa equals any of the twenty naturally occurring L-amino acids
  MISC_FEATURE (19): Xaa equals any of the twenty naturally occurring L-amino acids
  MISC_FEATURE (39): Xaa equals any of the twenty naturally occurring L-amino acids
  MISC_FEATURE (47): Xaa equals any of the twenty naturally occurring L-amino acids
SASAXSCDVPSPXNHXPGXHLDSHRRMAPTPIPTRSPSXSSTASTPXAEQ

SEQ ID NO: 3744 - protein, 30 aa, Homo sapiens
  MISC_FEATURE (22): Xaa equals any of the twenty naturally occurring L-amino acids
  MISC_FEATURE (26): Xaa equals any of the twenty naturally occurring L-amino acids
VKNLSDSVHFFLHLMNLSSADXYHLXIFPP

SEQ ID NO: 3745 - protein, 132 aa, Homo sapiens
  MISC_FEATURE (75): Xaa equals any of the twenty naturally occurring L-amino acids
  MISC_FEATURE (108): Xaa equals any of the twenty naturally occurring L-amino acids
  MISC_FEATURE (128): Xaa equals any of the twenty naturally occurring L-amino acids
  MISC_FEATURE (130): Xaa equals any of the twenty naturally occurring L-amino acids
QAQTFVTGTDQRVNTKGEHGSILHRAFQPQITWPLRGPSPRPDRPAWPGLRISLPRRPFPTADMLGGSGSHGRRXLAALSQIAYQRNDDDEEEAARERRRRARQERLXQKQEEESLGQVTDQVEVNAXNXCA

SEQ ID NO: 3746 - protein, 165 aa, Homo sapiens
  MISC_FEATURE (147): Xaa equals any of the twenty naturally occurring L-amino acids
  MISC_FEATURE (152): Xaa equals any of the twenty naturally occurring L-amino acids
  MISC_FEATURE (156): Xaa equals any of the twenty naturally occurring L-amino acids
  MISC_FEATURE (162): Xaa equals any of the twenty naturally occurring L-amino acids
GRVGTESVLQGLLKPLFKSTSVGPLYSGCRLTLLRPEKDGVATRVDAICTHRPDPKIPGLDRQQLYWELSQLTHSITELGPYTLDRDSLYVNGFTQRSSVPTTSTPGTFTVQPETSETPSSLPGPTATGPVLLPFTLNFTITNLQYXEDMHXPGSXKFNTTXRVL

SEQ ID NO: 3747 - protein, 114 aa, Homo sapiens
  MISC_FEATURE (96): Xaa equals any of the twenty naturally occurring L-amino acids
APARPSIHHSACFLGPEIMPLGLLWLGLALLGALHAQAQDSTSDLIPAPPLSKVPLQQNFQDNQVRADISWGCESQTDVTGKGWPKLRDPVVHLAXLPGIHLCSSFLCSLEQRL

SEQ ID NO: 3748 - protein, 78 aa, Homo sapiens
  MISC_FEATURE (24): Xaa equals any of the twenty naturally occurring L-amino acids
  MISC_FEATURE (40): Xaa equals any of the twenty naturally occurring L-amino acids
  MISC_FEATURE (42): Xaa equals any of the twenty naturally occurring L-amino acids
  MISC_FEATURE (58): Xaa equals any of the twenty naturally occurring L-amino acids
  MISC_FEATURE (67): Xaa equals any of the twenty naturally occurring L-amino acids
RLRMPLTFLAVWSSTTCGCLGRRXETSRGCLLQEALREAXQXPSFCTEGLLVPLGKGXLPPPVQKLXLKSDLGFPSSG

SEQ ID NO: 3749 - protein, 107 aa, Homo sapiens
  MISC_FEATURE (70): Xaa equals any of the twenty naturally occurring L-amino acids
  MISC_FEATURE (86): Xaa equals any of the twenty naturally occurring L-amino acids
  MISC_FEATURE (93): Xaa equals any of the twenty naturally occurring L-amino acids
  MISC_FEATURE (98): Xaa equals any of the twenty naturally occurring L-amino acids
  MISC_FEATURE (102): Xaa equals any of the twenty naturally occurring L-amino acids
GDFSVCRNCKRHVVSANFTLHEAYCLRFLVLCPECEEPVPKETMEEHCKLEHQQAYGSGIGKRFWFQEKXAVLLRSVKRGCEKGRXWKAVRWXLFPLXMSFXWGPDL

SEQ ID NO: 3750 - protein, 57 aa, Homo sapiens
RTAVMPREDRATWKSNYFLKIIQLLDDYPKCFIVGADNVGSKQMQQIRMSLPGRLWC

SEQ ID NO: 3751 - protein, 99 aa, Homo sapiens
  MISC_FEATURE (24): Xaa equals any of the twenty naturally occurring L-amino acids
  MISC_FEATURE (39): Xaa equals any of the twenty naturally occurring L-amino acids
  MISC_FEATURE (46): Xaa equals any of the twenty naturally occurring L-amino acids
  MISC_FEATURE (70): Xaa equals any of the twenty naturally occurring L-amino acids
  MISC_FEATURE (87): Xaa equals any of the twenty naturally occurring L-amino acids
  MISC_FEATURE (90): Xaa equals any of the twenty naturally occurring L-amino acids
  MISC_FEATURE (91): Xaa equals any of the twenty naturally occurring L-amino acids
  MISC_FEATURE (92): Xaa equals any of the twenty naturally occurring L-amino acids
HGETLRRTKEEINELNRMIQRLTXEVENAKCQNSKLEAXVAQSEQXGEAALSDARCKLAELEGALHKAKXDMACLIREYHEVMNSKXGLXXXIATTGPC

SEQ ID NO: 3752 - protein, 111 aa, Homo sapiens
  MISC_FEATURE (2): Xaa equals any of the twenty naturally occurring L-amino acids
  MISC_FEATURE (8): Xaa equals any of the twenty naturally occurring L-amino acids
  MISC_FEATURE (9): Xaa equals any of the twenty naturally occurring L-amino acids
  MISC_FEATURE (16): Xaa equals any of the twenty naturally occurring L-amino acids
  MISC_FEATURE (69): Xaa equals any of the twenty naturally occurring L-amino acids
  MISC_FEATURE (87): Xaa equals any of the twenty naturally occurring L-amino acids
  MISC_FEATURE (89): Xaa equals any of the twenty naturally occurring L-amino acids
  MISC_FEATURE (103): Xaa equals any of the twenty naturally occurring L-amino acids
  MISC_FEATURE (108): Xaa equals any of the twenty naturally occurring L-amino acids
  MISC_FEATURE (110): Xaa equals any of the twenty naturally occurring L-amino acids
RXGTRLEXXVNSFGIXDTIEGTPAGTGPEFPGRPTRPVAARERESRPGASPARPRMKKAGIDLPLRQFXGPPWCTQTTSWPCAPSCXSXPSASWRRPWPRGEXTCSRXSXW

SEQ ID NO: 3753 - protein, 157 aa, Homo sapiens
  MISC_FEATURE (22): Xaa equals any of the twenty naturally occurring L-amino acids
  MISC_FEATURE (103): Xaa equals any of the twenty naturally occurring L-amino acids
  MISC_FEATURE (126): Xaa equals any of the twenty naturally occurring L-amino acids
  MISC_FEATURE (130): Xaa equals any of the twenty naturally occurring L-amino acids
  MISC_FEATURE (137): Xaa equals any of the twenty naturally occurring L-amino acids
  MISC_FEATURE (152): Xaa equals any of the twenty naturally occurring L-amino acids
KVRLQVPVRNSRVDPRVREIIXEKDQADFRGVRGDFNSRMGGGSIEVSVPRFAVGIVIGRNGEMIKKIQNDAGVRIQFKPDDGISPERAAQVMGPPDRCQHAXHIISELILTAQERDGFGGLAAAXGRGXWPVATGXWEPLVASRRYIHGAXRLVWP

SEQ ID NO: 3754 - protein, 141 aa, Homo sapiens
KVRLQVPVRNSRVDPRVRRANITAIRRVRKTDNNRIARACGARIVSRPEELREDDVGTGAGLLEIKKIGDEYFTFITDCKDPKACTILLRGASKEILSEVERNLQDAMQVCRNVLLDPQLVPGGGAFEMAVAHALTEKSMP

SEQ ID NO: 3755 - protein, 139 aa, Homo sapiens
  MISC_FEATURE (100): Xaa equals any of the twenty naturally occurring L-amino acids
  MISC_FEATURE (136): Xaa equals any of the twenty naturally occurring L-amino acids
  MISC_FEATURE (139): Xaa equals any of the twenty naturally occurring L-amino acids
GDGRGALQNIIPASTGAAKAVGKVIPELNGKLTGMAFRVPTANVSVVDLTCRLEKPAKYDDIKKVVKQASEGPLKGILGYTEHQVVSSDFNSDTHSSTFXAGAGIALNDHFVKLISWYDNEFGYSNRVVDLMAHMXSKX

SEQ ID NO: 3756 - protein, 80 aa, Homo sapiens
  MISC_FEATURE (11): Xaa equals any of the twenty naturally occurring L-amino acids
  MISC_FEATURE (13): Xaa equals any of the twenty naturally occurring L-amino acids
  MISC_FEATURE (14): Xaa equals any of the twenty naturally occurring L-amino acids
  MISC_FEATURE (21): Xaa equals any of the twenty naturally occurring L-amino acids
  MISC_FEATURE (30): Xaa equals any of the twenty naturally occurring L-amino acids
  MISC_FEATURE (35): Xaa equals any of the twenty naturally occurring L-amino acids
  MISC_FEATURE (41): Xaa equals any of the twenty naturally occurring L-amino acids
  MISC_FEATURE (59): Xaa equals any of the twenty naturally occurring L-amino acids
  MISC_FEATURE (70): Xaa equals any of the twenty naturally occurring L-amino acids
  MISC_FEATURE (74): Xaa equals any of the twenty naturally occurring L-amino acids
  MISC_FEATURE (76): Xaa equals any of the twenty naturally occurring L-amino acids
SFSSFSRVGSXGXXGGLGGGXGAASGMGGXTAVTXNQSLLXPLVLEVDPNIQASAHPGXGADQDPQQQVXLLHXQXTVPG

SEQ ID NO: 3757 - protein, 108 aa, Homo sapiens
  MISC_FEATURE (100): Xaa equals any of the twenty naturally occurring L-amino acids
ASADLSPYVRKNAAHAIQKLYSLDPEQKEMLIEVIEKLLKDKSTLVAGSVVMAFEEVCPDRIDLIHKNYRKLCNLLVDVEEWGQVVIIHMLTRYARTQFXNPWKKVMN

SEQ ID NO: 3758 - protein, 108 aa, Homo sapiens
  MISC_FEATURE (1): Xaa equals any of the twenty naturally occurring L-amino acids
  MISC_FEATURE (4): Xaa equals any of the twenty naturally occurring L-amino acids
  MISC_FEATURE (7): Xaa equals any of the twenty naturally occurring L-amino acids
  MISC_FEATURE (98): Xaa equals any of the twenty naturally occurring L-amino acids
  MISC_FEATURE (101): Xaa equals any of the twenty naturally occurring L-amino acids
  MISC_FEATURE (104): Xaa equals any of the twenty naturally occurring L-amino acids
  MISC_FEATURE (108): Xaa equals any of the twenty naturally occurring L-amino acids
XAWXHLXGTPAGTGPEFPGLRAYLEGTCVEWLRRYLENGKETLQRTDAPKTHMTHHAVSDHEATLRCWALSFYPAEITLTWQRDGEDQTQDTELVETXPAXDGXFHNX

SEQ ID NO: 3759 - protein, 108 aa, Homo sapiens
  MISC_FEATURE (20): Xaa equals any of the twenty naturally occurring L-amino acids
  MISC_FEATURE (27): Xaa equals any of the twenty naturally occurring L-amino acids
  MISC_FEATURE (37): Xaa equals any of the twenty naturally occurring L-amino acids
  MISC_FEATURE (54): Xaa equals any of the twenty naturally occurring L-amino acids
  MISC_FEATURE (64): Xaa equals any of the twenty naturally occurring L-amino acids
  MISC_FEATURE (72): Xaa equals any of the twenty naturally occurring L-amino acids
  MISC_FEATURE (84): Xaa equals any of the twenty naturally occurring L-amino acids
  MISC_FEATURE (87): Xaa equals any of the twenty naturally occurring L-amino acids
  MISC_FEATURE (100): Xaa equals any of the twenty naturally occurring L-amino acids
  MISC_FEATURE (103): Xaa equals any of the twenty naturally occurring L-amino acids
  MISC_FEATURE (108): Xaa equals any of the twenty naturally occurring L-amino acids
GRLDGEWGGQRSGGTRGKRXIAARREXEEQEEEQRRXKTPREGQRTMESGSTGXSEEARSLREXELYVQKHXIQALLKDSIVQXSTXRPERPMAFLREYXERXENEEX

SEQ ID NO: 3760 - protein, 75 aa, Homo sapiens
  MISC_FEATURE (5): Xaa equals any of the twenty naturally occurring L-amino acids
  MISC_FEATURE (7): Xaa equals any of the twenty naturally occurring L-amino acids
  MISC_FEATURE (24): Xaa equals any of the twenty naturally occurring L-amino acids
  MISC_FEATURE (26): Xaa equals any of the twenty naturally occurring L-amino acids
  MISC_FEATURE (37): Xaa equals any of the twenty naturally occurring L-amino acids
  MISC_FEATURE (38): Xaa equals any of the twenty naturally occurring L-amino acids
  MISC_FEATURE (45): Xaa equals any of the twenty naturally occurring L-amino acids
  MISC_FEATURE (57): Xaa equals any of the twenty naturally occurring L-amino acids
  MISC_FEATURE (60): Xaa equals any of the twenty naturally occurring L-amino acids
  MISC_FEATURE (62): Xaa equals any of the twenty naturally occurring L-amino acids
IKGMXAXTGPEFPGRPTRPVPWTXFXGDIDNRREKGXXTGTHRGXRKVALAAVASAXAAXPXYSVPFSCCRCRSS

SEQ ID NO: 3761 - protein, 70 aa, Homo sapiens
TLHNHLLYWGLFLVLPGSEERDEESGNWPFFSSLLSVQHSARLFSTFSGPSTGQGLGDRAHGQMGEEVSS

SEQ ID NO: 3762 - protein, 74 aa, Homo sapiens
  MISC_FEATURE (11): Xaa equals any of the twenty naturally occurring L-amino acids
  MISC_FEATURE (29): Xaa equals any of the twenty naturally occurring L-amino acids
  MISC_FEATURE (37): Xaa equals any of the twenty naturally occurring L-amino acids
  MISC_FEATURE (43): Xaa equals any of the twenty naturally occurring L-amino acids
  MISC_FEATURE (44): Xaa equals any of the twenty naturally occurring L-amino acids
  MISC_FEATURE (51): Xaa equals any of the twenty naturally occurring L-amino acids
  MISC_FEATURE (69): Xaa equals any of the twenty naturally occurring L-amino acids
  MISC_FEATURE (72): Xaa equals any of the twenty naturally occurring L-amino acids
CRFPGNSLRFXCGYRSGIPGSTHASGGTXSRLLVSAXQDGKLXXWDSYTTXKVHTIPLRSYWVMTCAYXLLXEL

SEQ ID NO: 3763 - protein, 125 aa, Homo sapiens
  MISC_FEATURE (3): Xaa equals any of the twenty naturally occurring L-amino acids
  MISC_FEATURE (8): Xaa equals any of the twenty naturally occurring L-amino acids
  MISC_FEATURE (77): Xaa equals any of the twenty naturally occurring L-amino acids
  MISC_FEATURE (92): Xaa equals any of the twenty naturally occurring L-amino acids
  MISC_FEATURE (108): Xaa equals any of the twenty naturally occurring L-amino acids
  MISC_FEATURE (123): Xaa equals any of the twenty naturally occurring L-amino acids
PTXSPTRXRTRGPESGAAAARPRRAQFAVRAGSHPGPTPTRPGQAPYSVATMEVMNLMEQPIKVTEWQQTYTYDSGXHSGANTCVPFVKQAXGIMEEDEGLRAPVHAXEKHHLHPRGCPPSQXGS

SEQ ID NO: 3764 - protein, 122 aa, Homo sapiens
  MISC_FEATURE (82): Xaa equals any of the twenty naturally occurring L-amino acids
  MISC_FEATURE (120): Xaa equals any of the twenty naturally occurring L-amino acids
RALDCGTPEPRTEAKRTRARSPRPAKPGSGTSRNLPSCARSRRPHSPPGRERRCLALCLRVSAGASRALPEPPPPVAGIPSXLPCQPGRCRLVFARCSADGAAKLQLMVLASLPTCGSNXAD

SEQ ID NO: 3765 - protein, 139 aa, Homo sapiens
  MISC_FEATURE (57): Xaa equals any of the twenty naturally occurring L-amino acids
  MISC_FEATURE (113): Xaa equals any of the twenty naturally occurring L-amino acids
  MISC_FEATURE (128): Xaa equals any of the twenty naturally occurring L-amino acids
  MISC_FEATURE (135): Xaa equals any of the twenty naturally occurring L-amino acids
  MISC_FEATURE (136): Xaa equals any of the twenty naturally occurring L-amino acids
GKLIQQTFRQFANLNREESILKFFEILSPVYRFDKECFKCALGSSWIISVELAIGPXEGISYLTDKGCNPTHLADFTQVQTIQYSNSEDKDRKGMLQLKIAGAPEPLTVTAPXLTIAENMADLIDGYXRLVNGTXXSFY

SEQ ID NO: 3766 - protein, 26 aa, Homo sapiens
  MISC_FEATURE (6): Xaa equals any of the twenty naturally occurring L-amino acids
  MISC_FEATURE (9): Xaa equals any of the twenty naturally occurring L-amino acids
  MISC_FEATURE (12): Xaa equals any of the twenty naturally occurring L-amino acids
  MISC_FEATURE (13): Xaa equals any of the twenty naturally occurring L-amino acids
  MISC_FEATURE (17): Xaa equals any of the twenty naturally occurring L-amino acids
IGNTFXYLXWCXXYLPXIDRKFLEGG

SEQ ID NO: 3767 - protein, 31 aa, Homo sapiens
  MISC_FEATURE (6): Xaa equals any of the twenty naturally occurring L-amino acids
  MISC_FEATURE (21): Xaa equals any of the twenty naturally occurring L-amino acids
  MISC_FEATURE (25): Xaa equals any of the twenty naturally occurring L-amino acids
KLQDAXEFRYAKMPDEPLEPXPLPXSTAMPP

SEQ ID NO: 3768 - protein, 102 aa, Homo sapiens
  MISC_FEATURE (6): Xaa equals any of the twenty naturally occurring L-amino acids
AGRLAXRYRSGIPGSTHASGHSSYQYRISSLTSEGQECFLVCVLESLPALFHGSEMPLGPVQVYLSLISESCSSCLTLPHGSSVHLSITVLNPFSISSIIKE

SEQ ID NO: 3769 - protein, 56 aa, Homo sapiens
  MISC_FEATURE (3): Xaa equals any of the twenty naturally occurring L-amino acids
  MISC_FEATURE (35): Xaa equals any of the twenty naturally occurring L-amino acids
  MISC_FEATURE (39): Xaa equals any of the twenty naturally occurring L-amino acids
  MISC_FEATURE (49): Xaa equals any of the twenty naturally occurring L-amino acids
  MISC_FEATURE (53): Xaa equals any of the twenty naturally occurring L-amino acids
YVXSKIFRSHYIMYACRYRSGFAAASTPPPFFFFXFFFXFFFFFFFFFXLFFXFFF

SEQ ID NO: 3770 - protein, 62 aa, Homo sapiens
  MISC_FEATURE (59): Xaa equals any of the twenty naturally occurring L-amino acids
SPWKQQIPFMRYMSNFSIFHPGLTETVAKNWETLLFQANLTSFTRSFVMSSNTEATHSXLAG

SEQ ID NO: 3771 - protein, 62 aa, Homo sapiens
  MISC_FEATURE (24): Xaa equals any of the twenty naturally occurring L-amino acids
  MISC_FEATURE (57): Xaa equals any of the twenty naturally occurring L-amino acids
  MISC_FEATURE (59): Xaa equals any of the twenty naturally occurring L-amino acids
IASGRSRGSKLTYACMRRHSSSIXSPKFNSLADVLQRRDWENPFNYLIFFYAFLCLXIXSLR

SEQ ID NO: 3772 - protein, 48 aa, Homo sapiens
  MISC_FEATURE (17): Xaa equals any of the twenty naturally occurring L-amino acids
  MISC_FEATURE (21): Xaa equals any of the twenty naturally occurring L-amino acids
  MISC_FEATURE (38): Xaa equals any of the twenty naturally occurring L-amino acids
  MISC_FEATURE (45): Xaa equals any of the twenty naturally occurring L-amino acids
IASGRSRGSKLTYACMXRHSXSIVSPKFNSLAVVLQRXDWENPGXYPT

SEQ ID NO: 3773 - protein, 45 aa, Homo sapiens
  MISC_FEATURE (1): Xaa equals any of the twenty naturally occurring L-amino acids
  MISC_FEATURE (3): Xaa equals any of the twenty naturally occurring L-amino acids
  MISC_FEATURE (7): Xaa equals any of the twenty naturally occurring L-amino acids
  MISC_FEATURE (8): Xaa equals any of the twenty naturally occurring L-amino acids
  MISC_FEATURE (10): Xaa equals any of the twenty naturally occurring L-amino acids
  MISC_FEATURE (20): Xaa equals any of the twenty naturally occurring L-amino acids
  MISC_FEATURE (23): Xaa equals any of the twenty naturally occurring L-amino acids
  MISC_FEATURE (25): Xaa equals any of the twenty naturally occurring L-amino acids
  MISC_FEATURE (27): Xaa equals any of the twenty naturally occurring L-amino acids
  MISC_FEATURE (34): Xaa equals any of the twenty naturally occurring L-amino acids
  MISC_FEATURE (37): Xaa equals any of the twenty naturally occurring L-amino acids
XSXSKKXXKXGRSRGSKLTXACXRXHXSSIVSPXFNXLAVVVQQS

SEQ ID NO: 3774 - protein, 108 aa, Homo sapiens
  MISC_FEATURE (14): Xaa equals any of the twenty naturally occurring L-amino acids
  MISC_FEATURE (27): Xaa equals any of the twenty naturally occurring L-amino acids
  MISC_FEATURE (35): Xaa equals any of the twenty naturally occurring L-amino acids
  MISC_FEATURE (44): Xaa equals any of the twenty naturally occurring L-amino acids
  MISC_FEATURE (53): Xaa equals any of the twenty naturally occurring L-amino acids
  MISC_FEATURE (67): Xaa equals any of the twenty naturally occurring L-amino acids
  MISC_FEATURE (73): Xaa equals any of the twenty naturally occurring L-amino acids
  MISC_FEATURE (83): Xaa equals any of the twenty naturally occurring L-amino acids
  MISC_FEATURE (88): Xaa equals any of the twenty naturally occurring L-amino acids
  MISC_FEATURE (98): Xaa equals any of the twenty naturally occurring L-amino acids
  MISC_FEATURE (105): Xaa equals any of the twenty naturally occurring L-amino acids
ISKRLGDLFEFFLXCCIIFNKSGTTKXKKKGGRSXGSKLTYACXRRHSSSIVXPKFNSLAVCFTTVXTGKTLXLPNLIALQHXPLSPXGCNSEKARTXRPSQQLXSLN

SEQ ID NO: 3775 - protein, 64 aa, Homo sapiens
VQDISSIQSSTLCTLQPGSCNQESVQALFTSKLQLFNVVTMPLTSAHALPVFRKYPLLSVVYIL

SEQ ID NO: 3776 - protein, 100 aa, Homo sapiens
  MISC_FEATURE (7): Xaa equals any of the twenty naturally occurring L-amino acids
  MISC_FEATURE (8): Xaa equals any of the twenty naturally occurring L-amino acids
  MISC_FEATURE (9): Xaa equals any of the twenty naturally occurring L-amino acids
  MISC_FEATURE (11): Xaa equals any of the twenty naturally occurring L-amino acids
  MISC_FEATURE (53): Xaa equals any of the twenty naturally occurring L-amino acids
  MISC_FEATURE (90): Xaa equals any of the twenty naturally occurring L-amino acids
  MISC_FEATURE (93): Xaa equals any of the twenty naturally occurring L-amino acids
  MISC_FEATURE (94): Xaa equals any of the twenty naturally occurring L-amino acids
  MISC_FEATURE (98): Xaa equals any of the twenty naturally occurring L-amino acids
NILSKKXXXKXGGRSRGSKLTYACMRRHSSSIVSPKCNSLAVVLQRRDWENPXVTQLNRLAAHPPFASWRNSEEARTDRPSQQLRSLNGXWDXXCNRXIK

SEQ ID NO: 3777 - protein, 62 aa, Homo sapiens
  MISC_FEATURE (5): Xaa equals any of the twenty naturally occurring L-amino acids
  MISC_FEATURE (21): Xaa equals any of the twenty naturally occurring L-amino acids
  MISC_FEATURE (23): Xaa equals any of the twenty naturally occurring L-amino acids
  MISC_FEATURE (25): Xaa equals any of the twenty naturally occurring L-amino acids
  MISC_FEATURE (34): Xaa equals any of the twenty naturally occurring L-amino acids
  MISC_FEATURE (39): Xaa equals any of the twenty naturally occurring L-amino acids
  MISC_FEATURE (40): Xaa equals any of the twenty naturally occurring L-amino acids
  MISC_FEATURE (43): Xaa equals any of the twenty naturally occurring L-amino acids
  MISC_FEATURE (46): Xaa equals any of the twenty naturally occurring L-amino acids
  MISC_FEATURE (53): Xaa equals any of the twenty naturally occurring L-amino acids
  MISC_FEATURE (54): Xaa equals any of the twenty naturally occurring L-amino acids
  MISC_FEATURE (56): Xaa equals any of the twenty naturally occurring L-amino acids
  MISC_FEATURE (59): Xaa equals any of the twenty naturally occurring L-amino acids
  MISC_FEATURE (62): Xaa equals any of the twenty naturally occurring L-amino acids
FDAIXKTYSYLTPDLWKETVXTXSXYQEFTDHLXKTHTXXSVXRTXAPAVATXXGXYTXKIX

SEQ ID NO: 3778 - protein, 51 aa, Homo sapiens
  MISC_FEATURE (36): Xaa equals any of the twenty naturally occurring L-amino acids
  MISC_FEATURE (41): Xaa equals any of the twenty naturally occurring L-amino acids
KKKKKGGRSRGSKLTYACMRRHSSSIVSPKFNSLAXVLQRXDWENPGCYPT

SEQ ID NO: 3779 - protein, 111 aa, Homo sapiens
SDGFKEVNVPKTRRTFCKKCGKHQPHKVTQYKKGKDSLYAQGKRRYDRKQSGYGGQTKPIFRKKAKTTKKIVLRLECVEPNCRSKRMLAIKRCKHFELGGDKKRKGQVIQF

SEQ ID NO: 3780 - protein, 55 aa, Homo sapiens
  MISC_FEATURE (2): Xaa equals any of the twenty naturally occurring L-amino acids
  MISC_FEATURE (22): Xaa equals any of the twenty naturally occurring L-amino acids
  MISC_FEATURE (33): Xaa equals any of the twenty naturally occurring L-amino acids
  MISC_FEATURE (40): Xaa equals any of the twenty naturally occurring L-amino acids
  MISC_FEATURE (42): Xaa equals any of the twenty naturally occurring L-amino acids
  MISC_FEATURE (45): Xaa equals any of the twenty naturally occurring L-amino acids
CXLNSIHWPVVLQRRDWENPGXSQLNRLAAHPXFASWRNXEXGPXSIALPNSCAS

SEQ ID NO: 3781 - protein, 71 aa, Homo sapiens
  MISC_FEATURE (1): Xaa equals any of the twenty naturally occurring L-amino acids
  MISC_FEATURE (12): Xaa equals any of the twenty naturally occurring L-amino acids
  MISC_FEATURE (15): Xaa equals any of the twenty naturally occurring L-amino acids
  MISC_FEATURE (18): Xaa equals any of the twenty naturally occurring L-amino acids
  MISC_FEATURE (22): Xaa equals any of the twenty naturally occurring L-amino acids
  MISC_FEATURE (27): Xaa equals any of the twenty naturally occurring L-amino acids
  MISC_FEATURE (38): Xaa equals any of the twenty naturally occurring L-amino acids
  MISC_FEATURE (44): Xaa equals any of the twenty naturally occurring L-amino acids
  MISC_FEATURE (60): Xaa equals any of the twenty naturally occurring L-amino acids
  MISC_FEATURE (66): Xaa equals any of the twenty naturally occurring L-amino acids
XRGNLFSMLVIXCLXTFXEEFXSVTIXYTSIMLSYIYXFKCLIXKTDLCFSSNEDMCTWXLICMVXLSKKC

SEQ ID NO: 3782 - protein, 31 aa, Homo sapiens
  MISC_FEATURE (1): Xaa equals any of the twenty naturally occurring L-amino acids
  MISC_FEATURE (9): Xaa equals any of the twenty naturally occurring L-amino acids
  MISC_FEATURE (27): Xaa equals any of the twenty naturally occurring L-amino acids
XINLRFKIXPSKLKGHIIALELSIGTXPFRR

SEQ ID NO: 3783 - protein, 64 aa, Homo sapiens
  MISC_FEATURE (18): Xaa equals any of the twenty naturally occurring L-amino acids
  MISC_FEATURE (56): Xaa equals any of the twenty naturally occurring L-amino acids
  MISC_FEATURE (63): Xaa equals any of the twenty naturally occurring L-amino acids
ENMEQIEKFQEKAYVEFXDYITKTYPDDTYRLSRLLLRLPALRLMNATITEELFFXGLIGNIXN

SEQ ID NO: 3784 - protein, 49 aa, Homo sapiens
  MISC_FEATURE (3): Xaa equals any of the twenty naturally occurring L-amino acids
  MISC_FEATURE (10): Xaa equals any of the twenty naturally occurring L-amino acids
  MISC_FEATURE (11): Xaa equals any of the twenty naturally occurring L-amino acids
  MISC_FEATURE (15): Xaa equals any of the twenty naturally occurring L-amino acids
  MISC_FEATURE (22): Xaa equals any of the twenty naturally occurring L-amino acids
  MISC_FEATURE (40): Xaa equals any of the twenty naturally occurring L-amino acids
  MISC_FEATURE (46): Xaa equals any of the twenty naturally occurring L-amino acids
IRXYIPNKVXXKRKXKKKGGRXRGSKLTYACMRRHSSSIXSPKFNXLAV

SEQ ID NO: 3785 - protein, 79 aa, Homo sapiens
ETVTKGGIMLPEKSQGKVLQATVVAVGSGSKGKGGEIQPVSVKVGDKVLLPEYGGTKVVLDDKDYFLFRDGDILGKYVD

SEQ ID NO: 3786 - protein, 37 aa, Homo sapiens
  MISC_FEATURE (10): Xaa equals any of the twenty naturally occurring L-amino acids
  MISC_FEATURE (24): Xaa equals any of the twenty naturally occurring L-amino acids
  MISC_FEATURE (33): Xaa equals any of the twenty naturally occurring L-amino acids
  MISC_FEATURE (34): Xaa equals any of the twenty naturally occurring L-amino acids
GYGTILRCNXNTLEVWSCRLMKIXSFGLNLSLXXEFH

SEQ ID NO: 3787 - protein, 36 aa, Homo sapiens
  MISC_FEATURE (32): Xaa equals any of the twenty naturally occurring L-amino acids
LSARALSNPLKDVPTGLLLMMFCFVLGFGLFXYYKK

SEQ ID NO: 3788 - protein, 66 aa, Homo sapiens
  MISC_FEATURE (2): Xaa equals any of the twenty naturally occurring L-amino acids
  MISC_FEATURE (5): Xaa equals any of the twenty naturally occurring L-amino acids
  MISC_FEATURE (14): Xaa equals any of the twenty naturally occurring L-amino acids
  MISC_FEATURE (37): Xaa equals any of the twenty naturally occurring L-amino acids
  MISC_FEATURE (44): Xaa equals any of the twenty naturally occurring L-amino acids
  MISC_FEATURE (58): Xaa equals any of the twenty naturally occurring L-amino acids
  MISC_FEATURE (63): Xaa equals any of the twenty naturally occurring L-amino acids
  MISC_FEATURE (65): Xaa equals any of the twenty naturally occurring L-amino acids
GXNEXAIAFANSYXESWYACRYRSGIPGSTHASEKLXDIDVAKXNTLIRPDGEKKAYXRLAPXYXA

SEQ ID NO: 3789 - protein, 129 aa, Homo sapiens
  MISC_FEATURE (2): Xaa equals any of the twenty naturally occurring L-amino acids
  MISC_FEATURE (81): Xaa equals any of the twenty naturally occurring L-amino acids
  MISC_FEATURE (84): Xaa equals any of the twenty naturally occurring L-amino acids
  MISC_FEATURE (86): Xaa equals any of the twenty naturally occurring L-amino acids
  MISC_FEATURE (87): Xaa equals any of the twenty naturally occurring L-amino acids
  MISC_FEATURE (94): Xaa equals any of the twenty naturally occurring L-amino acids
  MISC_FEATURE (112): Xaa equals any of the twenty naturally occurring L-amino acids
  MISC_FEATURE (117): Xaa equals any of the twenty naturally occurring L-amino acids
  MISC_FEATURE (118): Xaa equals any of the twenty naturally occurring L-amino acids
  MISC_FEATURE (128): Xaa equals any of the twenty naturally occurring L-amino acids
SXRGKAGVDRHEHEKTRSKLTLAMCNCYVLQNEQRCIKLMQIYMLILTIKFLMCFTLQYFSIRLVQIKPCSRLYIFTSQPXNYXKXXPALKGFXLTYACMRRHSSSIVSPKXNSLAXXFTTSRLGKPXR

SEQ ID NO: 3790 - protein, 100 aa, Homo sapiens
  MISC_FEATURE (77): Xaa equals any of the twenty naturally occurring L-amino acids
  MISC_FEATURE (85): Xaa equals any of the twenty naturally occurring L-amino acids
  MISC_FEATURE (88): Xaa equals any of the twenty naturally occurring L-amino acids
IDRYPRKVTAAMGKKKIAKRSKIKSFVKVYNYNHLMPTRYSVDIPLDKTVVNKDVFRDPALKRKARREAKVKFEERXKTGKNKVXLPXKLAGLRCFVFDH

SEQ ID NO: 3791 - protein, 57 aa, Homo sapiens
KASKTLGKGGIKYKHIWLTVNELIFINCFCPYKMLIFTGNLASFTIMTKVPDYNARI

SEQ ID NO: 3792 - protein, 56 aa, Homo sapiens
QCVFILNCSVFLNCQEKQLCKFGDIFQQLFVFSVLMWKLTLTKKGSWQKQPSSTLF

SEQ ID NO: 3793 - protein, 54 aa, Homo sapiens
  MISC_FEATURE (9): Xaa equals any of the twenty naturally occurring L-amino acids
  MISC_FEATURE (14): Xaa equals any of the twenty naturally occurring L-amino acids
  MISC_FEATURE (19): Xaa equals any of the twenty naturally occurring L-amino acids
  MISC_FEATURE (31): Xaa equals any of the twenty naturally occurring L-amino acids
LKGGITTGXVGTPXGTGPXFPGRPTRPKKKXFLFFLLLVVLNVRYFFSMGSKGT

SEQ ID NO: 3794 - protein, 30 aa, Homo sapiens
  MISC_FEATURE (7): Xaa equals any of the twenty naturally occurring L-amino acids
  MISC_FEATURE (10): Xaa equals any of the twenty naturally occurring L-amino acids
  MISC_FEATURE (12): Xaa equals any of the twenty naturally occurring L-amino acids
  MISC_FEATURE (26): Xaa equals any of the twenty naturally occurring L-amino acids
  MISC_FEATURE (30): Xaa equals any of the twenty naturally occurring L-amino acids
LYFVSMXRLXTXRQAINSSNNFFISXKKKX

SEQ ID NO: 3795 - protein, 43 aa, Homo sapiens
RHVCLLVISNSNSFYLFVSHCFILLRRRHDRIVSFSLTLDAVR

SEQ ID NO: 3796 - protein, 66 aa, Homo sapiens
  MISC_FEATURE (10): Xaa equals any of the twenty naturally occurring L-amino acids
  MISC_FEATURE (19): Xaa equals any of the twenty naturally occurring L-amino acids
  MISC_FEATURE (23): Xaa equals any of the twenty naturally occurring L-amino acids
  MISC_FEATURE (54): Xaa equals any of the twenty naturally occurring L-amino acids
  MISC_FEATURE (65): Xaa equals any of the twenty naturally occurring L-amino acids
  MISC_FEATURE (66): Xaa equals any of the twenty naturally occurring L-amino acids
HTALSKSSLXGLWVLQFYXFLLXCIKITIFLITELPRQRDLVSLKSKPLNSKGXPNKNTVLQLQXX

SEQ ID NO: 3797 - protein, 48 aa, Homo sapiens
  MISC_FEATURE (18): Xaa equals any of the twenty naturally occurring L-amino acids
  MISC_FEATURE (44): Xaa equals any of the twenty naturally occurring L-amino acids
  MISC_FEATURE (46): Xaa equals any of the twenty naturally occurring L-amino acids
NYFAHMNINVTCNLKVKXFHAISCFGQKFLKNKLQLFSIKKKKXGXPF

SEQ ID NO: 3798 - protein, 44 aa, Homo sapiens
  MISC_FEATURE (34): Xaa equals any of the twenty naturally occurring L-amino acids
  MISC_FEATURE (37): Xaa equals any of the twenty naturally occurring L-amino acids
CHLNSIHWPSFYNVVTGKPILGMALPNLICFNNXINXVDDKKKK

SEQ ID NO: 3799 - protein, 63 aa, Homo sapiens
AELLFIHGGHTAKISDFSWNPNEPWVICSVSEDNIMQIWQMAENIYNDEESDVTTSELEGQGS

SEQ ID NO: 3800 - protein, 52 aa, Homo sapiens
  MISC_FEATURE (12): Xaa equals any of the twenty naturally occurring L-amino acids
  MISC_FEATURE (20): Xaa equals any of the twenty naturally occurring L-amino acids
  MISC_FEATURE (31): Xaa equals any of the twenty naturally occurring L-amino acids
  MISC_FEATURE (46): Xaa equals any of the twenty naturally occurring L-amino acids
TLNITFLLCTIXFLYNTYDXFPQDNKLPLRXISLVSQVSIFFCILXIILFFK

SEQ ID NO: 3801 - protein, 49 aa, Homo sapiens
CDLFLTDYESIMTCNKFPCISLTGLEDINISAFCLHGVFKSINIFLLLF

SEQ ID NO: 3802 - protein, 63 aa, Homo sapiens
  MISC_FEATURE (11): Xaa equals any of the twenty naturally occurring L-amino acids
  MISC_FEATURE (23): Xaa equals any of the twenty naturally occurring L-amino acids
  MISC_FEATURE (29): Xaa equals any of the twenty naturally occurring L-amino acids
  MISC_FEATURE (54): Xaa equals any of the twenty naturally occurring L-amino acids
NIVATLRGHLXFTSNLIKHQRWXQKRILXYYIGLKRHFLKINFRNWLLLTSTPXDETSISLNR

SEQ ID NO: 3803 - protein, 71 aa, Homo sapiens
  MISC_FEATURE (6): Xaa equals any of the twenty naturally occurring L-amino acids
  MISC_FEATURE (40): Xaa equals any of the twenty naturally occurring L-amino acids
AALSRXSPLIFCDVSGCFFFSGVFQASSTLRCSDVFMVWXLKEIKIHMDRHLCISQELLMHFLIISLREMG

SEQ ID NO: 3804 - protein, 79 aa, Homo sapiens
  MISC_FEATURE (17): Xaa equals any of the twenty naturally occurring L-amino acids
  MISC_FEATURE (18): Xaa equals any of the twenty naturally occurring L-amino acids
  MISC_FEATURE (22): Xaa equals any of the twenty naturally occurring L-amino acids
  MISC_FEATURE (36): Xaa equals any of the twenty naturally occurring L-amino acids
  MISC_FEATURE (52): Xaa equals any of the twenty naturally occurring L-amino acids
  MISC_FEATURE (57): Xaa equals any of the twenty naturally occurring L-amino acids
  MISC_FEATURE (69): Xaa equals any of the twenty naturally occurring L-amino acids
  MISC_FEATURE (72): Xaa equals any of the twenty naturally occurring L-amino acids
  MISC_FEATURE (76): Xaa equals any of the twenty naturally occurring L-amino acids
FGKAPTPAGTGPEFPGXXHAFXRNKLDHYAIIKFPXTTAPAMKKIEDNNTLXFIVDXKANKHQIKQAVXKLXDIDXAKV

SEQ ID NO: 3805 - protein, 113 aa, Homo sapiens
  MISC_FEATURE (16): Xaa equals any of the twenty naturally occurring L-amino acids
  MISC_FEATURE (18): Xaa equals any of the twenty naturally occurring L-amino acids
  MISC_FEATURE (22): Xaa equals any of the twenty naturally occurring L-amino acids
  MISC_FEATURE (32): Xaa equals any of the twenty naturally occurring L-amino acids
  MISC_FEATURE (36): Xaa equals any of the twenty naturally occurring L-amino acids
  MISC_FEATURE (41): Xaa equals any of the twenty naturally occurring L-amino acids
  MISC_FEATURE (47): Xaa equals any of the twenty naturally occurring L-amino acids
  MISC_FEATURE (48): Xaa equals any of the twenty naturally occurring L-amino acids
  MISC_FEATURE (54): Xaa equals any of the twenty naturally occurring L-amino acids
  MISC_FEATURE (64): Xaa equals any of the twenty naturally occurring L-amino acids
  MISC_FEATURE (80): Xaa equals any of the twenty naturally occurring L-amino acids
  MISC_FEATURE (93): Xaa equals any of the twenty naturally occurring L-amino acids
  MISC_FEATURE (99): Xaa equals any of the twenty naturally occurring L-amino acids
  MISC_FEATURE (102): Xaa equals any of the twenty naturally occurring L-amino acids
  MISC_FEATURE (110): Xaa equals any of the twenty naturally occurring L-amino acids
QAPVRNSRVDPRVFAXLXARQXASTCSRSPRXPAPXSSSRXSEAGHXXAPHNEXKLFSHSQNKXIKKGGRSRGSKLTYAXMRRHSSSIGSPKXNSLATXYNXVTGKTLAXPNL

SEQ ID NO: 3806 - protein, 81 aa, Homo sapiens
  MISC_FEATURE (12): Xaa equals any of the twenty naturally occurring L-amino acids
  MISC_FEATURE (14): Xaa equals any of the twenty naturally occurring L-amino acids
  MISC_FEATURE (17): Xaa equals any of the twenty naturally occurring L-amino acids
  MISC_FEATURE (20): Xaa equals any of the twenty naturally occurring L-amino acids
  MISC_FEATURE (22): Xaa equals any of the twenty naturally occurring L-amino acids
  MISC_FEATURE (23): Xaa equals any of the twenty naturally occurring L-amino acids
  MISC_FEATURE (38): Xaa equals any of the twenty naturally occurring L-amino acids
  MISC_FEATURE (50): Xaa equals any of the twenty naturally occurring L-amino acids
  MISC_FEATURE (60): Xaa equals any of the twenty naturally occurring L-amino acids
  MISC_FEATURE (63): Xaa equals any of the twenty naturally occurring L-amino acids
  MISC_FEATURE (73): Xaa equals any of the twenty naturally occurring L-amino acids
  MISC_FEATURE (78): Xaa equals any of the twenty naturally occurring L-amino acids
  MISC_FEATURE (81): Xaa equals any of the twenty naturally occurring L-amino acids
VLVKHSDFIGYXQXGIXSYXTXXYYYFLKRVFIFPKKXRMGSSIWLKKYXKKGRKITSLXWKXMVERNNILTXQKKKXGPX

SEQ ID NO: 3807 - protein, 49 aa, Homo sapiens
  MISC_FEATURE (18): Xaa equals any of the twenty naturally occurring L-amino acids
FYCEKVFIRYTHPSLMLXLGVDLQITTGILNQEHNQVSGQFDTAALILI

SEQ ID NO: 3808 - protein, 54 aa, Homo sapiens
DGIDNMVLTHRNKQARGERSRPTCLFSGNLMNRLLIFLVKVNSYPWSKTKVFIL

SEQ ID NO: 3809 - protein, 111 aa, Homo sapiens
  MISC_FEATURE (111): Xaa equals any of the twenty naturally occurring L-amino acids
QPSSALPPDTPGANSRNFLTSCFFLERETVGNFCELGCNYFITNMSCYYLQLQGTLVSHHFRALLRNRFCWHSSGVGSFLKMGSTRKAQVHAAVGRVTVLWFHVSYLIVTX

SEQ ID NO: 3810 - protein, 99 aa, Homo sapiens
  MISC_FEATURE (39): Xaa equals any of the twenty naturally occurring L-amino acids
  MISC_FEATURE (56): Xaa equals any of the twenty naturally occurring L-amino acids
  MISC_FEATURE (76): Xaa equals any of the twenty naturally occurring L-amino acids
  MISC_FEATURE (92): Xaa equals any of the twenty naturally occurring L-amino acids
YLTITYMCVEEFVLFVMYWYKQIQYKLTNTDLKIMHIWXSNLNLSHGFLWCGPIWXLHYIIPAVASKAHFFFLLKXFSLGILLWILVLLIMXLYFLSFF

SEQ ID NO: 3811 - protein, 61 aa, Homo sapiens
QDRPLKCDEPILSNRSGDHRGKFKVASFRKKYELRAPVAGTCYQAEWDDYVPKLYEQLSGK

SEQ ID NO: 3812 - protein, 154 aa, Homo sapiens
  MISC_FEATURE (153): Xaa equals any of the twenty naturally occurring L-amino acids
ARSAPPDGAVCAGPGSRRTEMAEQSDEAVKYYTLEEIQKHNHSKSTWLILHHKVYDLTKFLEEHPGGEEVLREQAGGDATENFEDVGHSTDAREMSKTFIIGELHPDDRPKLNKPPETLITTIDSSSSWWTNWVIPAISAVPVALMYRLYMAXD

SEQ ID NO: 3813 - protein, 145 aa, Homo sapiens
  MISC_FEATURE (2): Xaa equals any of the twenty naturally occurring L-amino acids
TXCLAERTPCCRPAEMLRLPTVFRQMRPVSRVLAPHLTRAYAKDVKFGADARALMLQGVDLLADAVAVTMGPKGRTVIIEQSWGSPKVTKDGVTVAKSIDLKDKYKNIGAKLVKMLPITQMKKLGMALPLLLYCTLYSQGRLRED

SEQ ID NO: 3814 - protein, 87 aa, Homo sapiens
LFLLVVYNFSITCDGQEICLSNKISLNIRCSWVKMSFYQIDLFMSSLGKYFKAFYILKNTCKSISHLKPVVHMWIYSSWTLLFSFNL

SEQ ID NO: 3815 - protein, 112 aa, Homo sapiens
  MISC_FEATURE (53): Xaa equals any of the twenty naturally occurring L-amino acids
  MISC_FEATURE (77): Xaa equals any of the twenty naturally occurring L-amino acids
DPLKKLNEKKKKKKGGRSRGSKLTYACMRRHSSSIVTPKFNSLAVVLQRRDWXNPGVTQLNRLAAHPPFASWRNSEXARTDRPSQQLRSLNGEWTRPVRCIKRGGCGGLRAA

SEQ ID NO: 3816 - protein, 45 aa, Homo sapiens
  MISC_FEATURE (5): Xaa equals any of the twenty naturally occurring L-amino acids
  MISC_FEATURE (16): Xaa equals any of the twenty naturally occurring L-amino acids
CSQFXSIFAFLLCFTXILSFVSRTLAIWGRNKISEMKQRNQHDKI

SEQ ID NO: 3817 - protein, 61 aa, Homo sapiens
GTQGLGCIRTPWRSVASCHPATHPPSQGGCCGGDPQGGFDTVLCCPSTGLILHPCAPPRGP

SEQ ID NO: 3818 - protein, 155 aa, Homo sapiens
  MISC_FEATURE (3): Xaa equals any of the twenty naturally occurring L-amino acids
  MISC_FEATURE (31): Xaa equals any of the twenty naturally occurring L-amino acids
  MISC_FEATURE (108): Xaa equals any of the twenty naturally occurring L-amino acids
  MISC_FEATURE (123): Xaa equals any of the twenty naturally occurring L-amino acids
  MISC_FEATURE (140): Xaa equals any of the twenty naturally occurring L-amino acids
  MISC_FEATURE (155): Xaa equals any of the twenty naturally occurring L-amino acids
VWXVRAARWTLPRSRIRSRNPMNPLSQTESXRMPFSRGLLKPGLNVVLEGPKKAVNDVNGLKQCLAEFKRDLEWVERLDVTLGPVPEIGGSEAPAPHNKDQKAVDPEXDFQREMSFYRQAQPXCLQSYPLHQLKVLQATXDILRNGKLTEIKIAX

SEQ ID NO: 3819 - protein, 85 aa, Homo sapiens
RLSVHIGSPVKSCAEPNMSFISKLPPISASCVASGNMWPYIRNFMARVSARWRSLLAWWVSSCPISLEGRAGSHEHGEYPWMLHS

SEQ ID NO: 3820 - protein, 45 aa, Homo sapiens
LSSPTPTKRNGCKSPDHPFRVHSPPPQVSSPSPKPAQSRVSLKGT

SEQ ID NO: 3821 - protein, 180 aa, Homo sapiens
  MISC_FEATURE (133): Xaa equals any of the twenty naturally occurring L-amino acids
RGSSAGFDRHITIFSPEGRLYQVEYAFKAINQGGLTSVAVRGKDCAVIVTQKKVPDKLLDSSTVTHLFKITENIGCVMTGMTADSRSQVQRARYEAANWKYKYGYEIPVDMLCKRIADISQVYTQNAEMRPLXCCMILIGIDEEQGPQVYKCDPAGYYCGFKATAAGVKQTESTSFLKKK

SEQ ID NO: 3822 - protein, 144 aa, Homo sapiens
  MISC_FEATURE (84): Xaa equals any of the twenty naturally occurring L-amino acids
  MISC_FEATURE (101): Xaa equals any of the twenty naturally occurring L-amino acids
  MISC_FEATURE (121): Xaa equals any of the twenty naturally occurring L-amino acids
  MISC_FEATURE (122): Xaa equals any of the twenty naturally occurring L-amino acids
  MISC_FEATURE (138): Xaa equals any of the twenty naturally occurring L-amino acids
EGSGPEWEPQRRALRRRNPIASERICLASKRKEAPFCKVEEGRGTGVSPASNLGLVLSVFLKPLKCKNYIALFLHFLFSLRLLXLFQTYFLGFLMEYIRLXISQTLASSPEILLDGERGRXXGPEGKGTPSFPGPVTXSPVPAQ

SEQ ID NO: 3823 - protein, 48 aa, Homo sapiens
  MISC_FEATURE (23): Xaa equals any of the twenty naturally occurring L-amino acids
PTLVLHYSSLKLSYCKFCLSVNXIKISSELFRRTQYYFKTIFEVILAF

SEQ ID NO: 3824 - protein, 46 aa, Homo sapiens
QQPMHQVFNINFGNKNVQLSKVNICKILYIVNRSLIHSNFTLCIDL

SEQ ID NO: 3825 - protein, 164 aa, Homo sapiens
  MISC_FEATURE (26): Xaa equals any of the twenty naturally occurring L-amino acids
  MISC_FEATURE (30): Xaa equals any of the twenty naturally occurring L-amino acids
  MISC_FEATURE (49): Xaa equals any of the twenty naturally occurring L-amino acids
  MISC_FEATURE (52): Xaa equals any of the twenty naturally occurring L-amino acids
  MISC_FEATURE (66): Xaa equals any of the twenty naturally occurring L-amino acids
  MISC_FEATURE (72): Xaa equals any of the twenty naturally occurring L-amino acids
  MISC_FEATURE (90): Xaa equals any of the twenty naturally occurring L-amino acids
  MISC_FEATURE (96): Xaa equals any of the twenty naturally occurring L-amino acids
  MISC_FEATURE (104): Xaa equals any of the twenty naturally occurring L-amino acids
  MISC_FEATURE (110): Xaa equals any of the twenty naturally occurring L-amino acids
  MISC_FEATURE (115): Xaa equals any of the twenty naturally occurring L-amino acids
  MISC_FEATURE (116): Xaa equals any of the twenty naturally occurring L-amino acids
  MISC_FEATURE (124): Xaa equals any of the twenty naturally occurring L-amino acids
  MISC_FEATURE (126): Xaa equals any of the twenty naturally occurring L-amino acids
  MISC_FEATURE (133): Xaa equals any of the twenty naturally occurring L-amino acids
  MISC_FEATURE (137): Xaa equals any of the twenty naturally occurring L-amino acids
  MISC_FEATURE (151): Xaa equals any of the twenty naturally occurring L-amino acids
  MISC_FEATURE (162): Xaa equals any of the twenty naturally occurring L-amino acids
ATKTPRSSSSGTWTVVEVHNAKTKPXEEQXNSTFRVVSVLTVLHQDWLXGRXYKCKGFKKSLQPHXENHFQXKDSPRTTGVHPAPSGRRXPRTRSXLNWLVKGXYPSDIXLEWEXXRAAPRTTXTXRLPCWTXTASXFSTASLPWTKNKLXTRGTIFFMLSXMP

SEQ ID NO: 3826 - protein, 50 aa, Homo sapiens
GGAALISLAPEGQSSLSFLPNQRKEALGASKFRNQGGLFCFLLEWNKMLI

SEQ ID NO: 3827 - protein, 64 aa, Homo sapiens
APGLLYSSQRSFSSFNPRKEASKLECEYNFCGPILRITRSPVVRKVRSPSTASCFLPLMSLQGK

SEQ ID NO: 3828 - protein, 69 aa, Homo sapiens
AVHARPARPTRPPPADRHSRTHCRVLPAARTHSMTIRCFVSHPFSMENQGDRAMIATGSFEERDTFREA

SEQ ID NO: 3829 - protein, 41 aa, Homo sapiens
  MISC_FEATURE (21): Xaa equals any of the twenty naturally occurring L-amino acids
YVWLGHFVAKVRTCLWKTSLXLGESVWPAASDLCRVLTCQG

SEQ ID NO: 3830 - protein, 54 aa, Homo sapiens
  MISC_FEATURE (49): Xaa equals any of the twenty naturally occurring L-amino acids
  MISC_FEATURE (50): Xaa equals any of the twenty naturally occurring L-amino acids
  MISC_FEATURE (51): Xaa equals any of the twenty naturally occurring L-amino acids
  MISC_FEATURE (53): Xaa equals any of the twenty naturally occurring L-amino acids
  MISC_FEATURE (54): Xaa equals any of the twenty naturally occurring L-amino acids
AKPVAAGEAAPVQRGGFLASGGGLASEARLHAGWPGARSSSRWWWWCRXXXQXX

SEQ ID NO: 3831 - protein, 225 aa, Homo sapiens
  MISC_FEATURE (182): Xaa equals any of the twenty naturally occurring L-amino acids
  MISC_FEATURE (189): Xaa equals any of the twenty naturally occurring L-amino acids
  MISC_FEATURE (216): Xaa equals any of the twenty naturally occurring L-amino acids
  MISC_FEATURE (221): Xaa equals any of the twenty naturally occurring L-amino acids
  MISC_FEATURE (223): Xaa equals any of the twenty naturally occurring L-amino acids
  MISC_FEATURE (224): Xaa equals any of the twenty naturally occurring L-amino acids
NSSPAANTFLVDSLISACRSDSFYSSSASMYMPPPSADMGTYGMQTCGLLPSLAKREVNHQNMGMNVHPYIPQVDSWTDPNRSCRIEQPVTQQVPTCSFTTNIKEESNCCMYSDKRNKLISAEVPSYQRLVPESCPVENPEVPVPGYFRLSQTYATGKTQEYNNSPEGSSTVMLQLNPRGAXKPQLSAXQLQMEKKMNEPVSGQEPTKSPRWRAPXAKRRXSXXE

SEQ ID NO: 3832 - protein, 69 aa, Homo sapiens
VAPSSVLYVVLLEFARTDARMCVLNHLLETSTLKVSTRLRSLKKKNNSVGSGRSFMRALKHLMSVHCVR

SEQ ID NO: 3833 - protein, 63 aa, Homo sapiens
PFHIKELLTTKAAPAFPICLSIWLAGKERTCMLVKEEVGWKKWGGTTVKSRVKPSWPKVSCRL

SEQ ID NO: 3834 - protein, 152 aa, Homo sapiens
  MISC_FEATURE (122): Xaa equals any of the twenty naturally occurring L-amino acids
  MISC_FEATURE (137): Xaa equals any of the twenty naturally occurring L-amino acids
EAKYKLCKVRKIFVGTKGIPHLVTHDARTIRYPDPLIKVNDTIQIDLETGKITDFIKFDTGNLCMVTGGANLGRIGVITNRERHPGSFDVVHVKDANGNSFATRLSNIFVIGKGNKPWISLXRGKGIRLTIAEERDXRLAAKQSIWVKWVPG

SEQ ID NO: 3835 - protein, 193 aa, Homo sapiens
  MISC_FEATURE (160): Xaa equals any of the twenty naturally occurring L-amino acids
  MISC_FEATURE (172): Xaa equals any of the twenty naturally occurring L-amino acids
  MISC_FEATURE (174): Xaa equals any of the twenty naturally occurring L-amino acids
  MISC_FEATURE (180): Xaa equals any of the twenty naturally occurring L-amino acids
  MISC_FEATURE (185): Xaa equals any of the twenty naturally occurring L-amino acids
GAFSAPGKPHPPEAKMSSKRAKAKTTKKRPQRATSNVFAMFDQSQIQEFKEAFNMIDQNRDGFIDKEDLHDMLASLGKNPTDEYLEGMMSEAPGPINFTMFLTMFGEKLNGTDPEDVIRNAFACFDEEASGFIHEDHLRELLTTMGDRFTDEEVDEMYRXAPIDKKGNFNYXEXPASSNXAPRIXTTRSPQPP

SEQ ID NO: 3836 - protein, 221 aa, Homo sapiens
  MISC_FEATURE (204): Xaa equals any of the twenty naturally occurring L-amino acids
  MISC_FEATURE (220): Xaa equals any of the twenty naturally occurring L-amino acids
AAPQLSDTADTMGFGDLKSPAGLQVLNDYLADKSYIEGYVPSQADVAVFEAVSSPPPADLCHALRWYNHIKSYEKEKASLPGVKKALGKYGPADVEDTTGSGATDSKDDDDIDLFGSDDEEESEEAKRLREERLAQYESKKAKKPALVAKSSILLDVKPWDDETDMAKLEECVRSIQADGLIWGSSKLVPVGYGIKKLSNTVCXLKMIKLEQICWRTDHXF

SEQ ID NO: 3837 - protein, 151 aa, Homo sapiens
  MISC_FEATURE (62): Xaa equals any of the twenty naturally occurring L-amino acids
  MISC_FEATURE (86): Xaa equals any of the twenty naturally occurring L-amino acids
  MISC_FEATURE (88): Xaa equals any of the twenty naturally occurring L-amino acids
  MISC_FEATURE (97): Xaa equals any of the twenty naturally occurring L-amino acids
  MISC_FEATURE (99): Xaa equals any of the twenty naturally occurring L-amino acids
  MISC_FEATURE (102): Xaa equals any of the twenty naturally occurring L-amino acids
  MISC_FEATURE (108): Xaa equals any of the twenty naturally occurring L-amino acids
  MISC_FEATURE (110): Xaa equals any of the twenty naturally occurring L-amino acids
  MISC_FEATURE (111): Xaa equals any of the twenty naturally occurring L-amino acids
  MISC_FEATURE (116): Xaa equals any of the twenty naturally occurring L-amino acids
  MISC_FEATURE (123): Xaa equals any of the twenty naturally occurring L-amino acids
  MISC_FEATURE (139): Xaa equals any of the twenty naturally occurring L-amino acids
  MISC_FEATURE (144): Xaa equals any of the twenty naturally occurring L-amino acids
  MISC_FEATURE (150): Xaa equals any of the twenty naturally occurring L-amino acids
FAMPLHKYPVWLWKRLQLRQGICSRLPGYYLRSLEEERTPTPVHYRPHGAKFKINPKNGQCXRVEDVPIPIYFPPESQRWLWSGEXWXLGQIYANNXKXSKXLKKVWXPXXFEREXYSEILDXKVTSDCDHADPGPHRXGLRLXFYILKXS

SEQ ID NO: 3838 - protein, 153 aa, Homo sapiens
AVYKALSDHHIYLEGTLLKPNMVTPGHACTQKFSHEEIAMATVTALRRTVPPAVTGITFLSGGQSEEEASINLNAINKCPLLKPWALTFSYGRALQASALKAWGGKKENLKAAQEEYVKRALANSLACQGKYTPSGQAGAAASESLFVSNHAY

SEQ ID NO: 3839 - protein, 154 aa, Homo sapiens
  MISC_FEATURE (1): Xaa equals any of the twenty naturally occurring L-amino acids
  MISC_FEATURE (13): Xaa equals any of the twenty naturally occurring L-amino acids
  MISC_FEATURE (15): Xaa equals any of the twenty naturally occurring L-amino acids
  MISC_FEATURE (17): Xaa equals any of the twenty naturally occurring L-amino acids
  MISC_FEATURE (18): Xaa equals any of the twenty naturally occurring L-amino acids
  MISC_FEATURE (20): Xaa equals any of the twenty naturally occurring L-amino acids
  MISC_FEATURE (21): Xaa equals any of the twenty naturally occurring L-amino acids
XGKMWDFTENQTXEXKXXFXXFDRTGDGKILYSQCGDVMRALGQNPTNAEVLKVLGNPKSDEMNVKVLDFEHFLPMLQTVAKNKDQGTYEDYVEGLRVFDKEGNGTVMGAEIRHVLVTLGEKMTEEEVEMLVAGHEDSNGCINYEAFVRHILSG

SEQ ID NO: 3840 - protein, 50 aa, Homo sapiens
  MISC_FEATURE (9): Xaa equals any of the twenty naturally occurring L-amino acids
  MISC_FEATURE (12): Xaa equals any of the twenty naturally occurring L-amino acids
  MISC_FEATURE (31): Xaa equals any of the twenty naturally occurring L-amino acids
  MISC_FEATURE (43): Xaa equals any of the twenty naturally occurring L-amino acids
  MISC_FEATURE (45): Xaa equals any of the twenty naturally occurring L-amino acids
  MISC_FEATURE (49): Xaa equals any of the twenty naturally occurring L-amino acids
  MISC_FEATURE (50): Xaa equals any of the twenty naturally occurring L-amino acids
LRYVSAICXEVXRIFLKSISQEWNKSTYPVXPLNKKTSFYCQXKXKKGXX

SEQ ID NO: 3841 - protein, 135 aa, Homo sapiens
GPALPEAHALGTLSAQQPPPAAATTSSTSLPFSPDSPGLLPNFPAPPPEGLMLSPAAVPVWSAGLELSAGTEGLLEAEKGLGTQAPHTVLRLPDPDPEGLLLGATAGGEVDEGLEAEAKVLTQLQSVPVEEPLEL

SEQ ID NO: 3842 - protein, 85 aa, Homo sapiens
  MISC_FEATURE (20): Xaa equals any of the twenty naturally occurring L-amino acids
ACDISRQLRVSHGCVSKILXRYYETGSIRPGVIGGSKPKVATPKVVEKIGDYKRQNPTMFAWEIRDRLLAEASVTMTLVPSVKLH

SEQ ID NO: 3843 - protein, 128 aa, Homo sapiens
  MISC_FEATURE (127): Xaa equals any of the twenty naturally occurring L-amino acids
GLRIFGPHAPAPDSPLPLSPRNSRSGSPRATAMAFKDTGKTPVEPEVAIHRIRITLTSRNVKSLEKVCADLIRGAKEKNLKVKGPVRMPTKTLRITTRKTPCGEGLRRGNRFQMRIHKPNSMDFAQXF

SEQ ID NO: 3844 - protein, 173 aa, Homo sapiens
  MISC_FEATURE (3): Xaa equals any of the twenty naturally occurring L-amino acids
  MISC_FEATURE (6): Xaa equals any of the twenty naturally occurring L-amino acids
  MISC_FEATURE (8): Xaa equals any of the twenty naturally occurring L-amino acids
  MISC_FEATURE (12): Xaa equals any of the twenty naturally occurring L-amino acids
  MISC_FEATURE (16): Xaa equals any of the twenty naturally occurring L-amino acids
  MISC_FEATURE (60): Xaa equals any of the twenty naturally occurring L-amino acids
  MISC_FEATURE (67): Xaa equals any of the twenty naturally occurring L-amino acids
  MISC_FEATURE (68): Xaa equals any of the twenty naturally occurring L-amino acids
  MISC_FEATURE (70): Xaa equals any of the twenty naturally occurring L-amino acids
  MISC_FEATURE (77): Xaa equals any of the twenty naturally occurring L-amino acids
  MISC_FEATURE (78): Xaa equals any of the twenty naturally occurring L-amino acids
  MISC_FEATURE (117): Xaa equals any of the twenty naturally occurring L-amino acids
  MISC_FEATURE (118): Xaa equals any of the twenty naturally occurring L-amino acids
  MISC_FEATURE (128): Xaa equals any of the twenty naturally occurring L-amino acids
  MISC_FEATURE (129): Xaa equals any of the twenty naturally occurring L-amino acids
  MISC_FEATURE (141): Xaa equals any of the twenty naturally occurring L-amino acids
  MISC_FEATURE (161): Xaa equals any of the twenty naturally occurring L-amino acids
  MISC_FEATURE (170): Xaa equals any of the twenty naturally occurring L-amino acids
VLXFRXAXAMKXELCXFSGYKIYPGHGRRYARTDGKVFQFLNAKCESAFLSKRNPCQINXTVLYRRXXKXGQSEEIXXKRTRRAVKFQRAITGASLADIMAKRNHKPEVRKAQREQXXRAAKEAKKAXXASKKTAMAAAKXPTKAAPKQKIVKPVKVSAPXVDGKRLTGXLDF

SEQ ID NO: 3845 - protein, 57 aa, Homo sapiens
  MISC_FEATURE (1): Xaa equals any of the twenty naturally occurring L-amino acids
XMLVALIEFCYKSRAEAKRMKVAKNAQNINPSSSQNSQNFATYKEGYNVYGIESVKI

SEQ ID NO: 3846 - protein, 91 aa, Homo sapiens
  MISC_FEATURE (3): Xaa equals any of the twenty naturally occurring L-amino acids
  MISC_FEATURE (4): Xaa equals any of the twenty naturally occurring L-amino acids
  MISC_FEATURE (28): Xaa equals any of the twenty naturally occurring L-amino acids
IMXXDQGEKENPMRELRIRKLCLNICVXESGDRLTRAAKVLEQLTGQTPVFSKARYTVRSFGIRRNEKIAVHCTVRGAKAEEILEKGLKVR

SEQ ID NO: 3847 - protein, 45 aa, Homo sapiens
  MISC_FEATURE (41): Xaa equals any of the twenty naturally occurring L-amino acids
GRPTRPVKHCLKILVSHNYAEFSQSLMHRESISFQLLIHLXTTFF

SEQ ID NO: 3848 - protein, 105 aa, Homo sapiens
  MISC_FEATURE (34): Xaa equals any of the twenty naturally occurring L-amino acids
  MISC_FEATURE (41): Xaa equals any of the twenty naturally occurring L-amino acids
  MISC_FEATURE (54): Xaa equals any of the twenty naturally occurring L-amino acids
  MISC_FEATURE (60): Xaa equals any of the twenty naturally occurring L-amino acids
  MISC_FEATURE (61): Xaa equals any of the twenty naturally occurring L-amino acids
  MISC_FEATURE (66): Xaa equals any of the twenty naturally occurring L-amino acids
  MISC_FEATURE (73): Xaa equals any of the twenty naturally occurring L-amino acids
  MISC_FEATURE (78): Xaa equals any of the twenty naturally occurring L-amino acids
  MISC_FEATURE (90): Xaa equals any of the twenty naturally occurring L-amino acids
  MISC_FEATURE (94): Xaa equals any of the twenty naturally occurring L-amino acids
  MISC_FEATURE (96): Xaa equals any of the twenty naturally occurring L-amino acids
  MISC_FEATURE (99): Xaa equals any of the twenty naturally occurring L-amino acids
SCHCRAPPWKTRRWWISKQKTEVVCGVPTQVVCXGLQQSHXVVVTHLGKRAPVXPGAQQXXHEVHXLCSTQNXSGGRXPLIQVFGKKPVXFVFXKXGNXHPPAVA

SEQ ID NO: 3849 - protein, 28 aa, Homo sapiens
VDPRVRHTGEKPYECKQCGKAFRSTSHL

SEQ ID NO: 3850 - protein, 87 aa, Homo sapiens
  MISC_FEATURE (47): Xaa equals any of the twenty naturally occurring L-amino acids
  MISC_FEATURE (78): Xaa equals any of the twenty naturally occurring L-amino acids
  MISC_FEATURE (80): Xaa equals any of the twenty naturally occurring L-amino acids
  MISC_FEATURE (86): Xaa equals any of the twenty naturally occurring L-amino acids
GLREACEHVAASEEEEDHSGPGETASSSSPPWRPLGKHDPWYCPNCXKHQQATKNLDLWSLPKILVVPLQTFLPNKQXPXGISSTXG

SEQ ID NO: 3851 - protein, 103 aa, Homo sapiens
  MISC_FEATURE (38): Xaa equals any of the twenty naturally occurring L-amino acids
  MISC_FEATURE (41): Xaa equals any of the twenty naturally occurring L-amino acids
  MISC_FEATURE (59): Xaa equals any of the twenty naturally occurring L-amino acids
  MISC_FEATURE (100): Xaa equals any of the twenty naturally occurring L-amino acids
ILVLESLAFKEAWGNGGKVRIDSDRILRWAELTSGIGXSVXIYLTCVQDGQAMLWDLNXVKHLYTLDGGDIINALCFSPNRYWLCAATGPSIQDLGFRGXRSL

SEQ ID NO: 3852 - protein, 61 aa, Homo sapiens
  MISC_FEATURE (3): Xaa equals any of the twenty naturally occurring L-amino acids
  MISC_FEATURE (7): Xaa equals any of the twenty naturally occurring L-amino acids
  MISC_FEATURE (15): Xaa equals any of the twenty naturally occurring L-amino acids
  MISC_FEATURE (17): Xaa equals any of the twenty naturally occurring L-amino acids
  MISC_FEATURE (18): Xaa equals any of the twenty naturally occurring L-amino acids
  MISC_FEATURE (19): Xaa equals any of the twenty naturally occurring L-amino acids
  MISC_FEATURE (35): Xaa equals any of the twenty naturally occurring L-amino acids
  MISC_FEATURE (36): Xaa equals any of the twenty naturally occurring L-amino acids
  MISC_FEATURE (38): Xaa equals any of the twenty naturally occurring L-amino acids
  MISC_FEATURE (39): Xaa equals any of the twenty naturally occurring L-amino acids
  MISC_FEATURE (59): Xaa equals any of the twenty naturally occurring L-amino acids
DKXLQRXMFPVTGHXDXXXGPPRDRLVPQIATSPXXGXXPIVKGTRGHLGPGWFKLGWXQD

SEQ ID NO: 3853 - protein, 42 aa, Homo sapiens
  MISC_FEATURE (37): Xaa equals any of the twenty naturally occurring L-amino acids
GRPTRPEPAAGLLELLHRSGILHARAVCGEDDSSEAXLPELL

SEQ ID NO: 3854 - protein, 62 aa, Homo sapiens
  MISC_FEATURE (3): Xaa equals any of the twenty naturally occurring L-amino acids
  MISC_FEATURE (5): Xaa equals any of the twenty naturally occurring L-amino acids
  MISC_FEATURE (14): Xaa equals any of the twenty naturally occurring L-amino acids
  MISC_FEATURE (15): Xaa equals any of the twenty naturally occurring L-amino acids
  MISC_FEATURE (17): Xaa equals any of the twenty naturally occurring L-amino acids
  MISC_FEATURE (19): Xaa equals any of the twenty naturally occurring L-amino acids
  MISC_FEATURE (22): Xaa equals any of the twenty naturally occurring L-amino acids
  MISC_FEATURE (23): Xaa equals any of the twenty naturally occurring L-amino acids
  MISC_FEATURE (24): Xaa equals any of the twenty naturally occurring L-amino acids
  MISC_FEATURE (28): Xaa equals any of the twenty naturally occurring L-amino acids
  MISC_FEATURE (29): Xaa equals any of the twenty naturally occurring L-amino acids
  MISC_FEATURE (30): Xaa equals any of the twenty naturally occurring L-amino acids
  MISC_FEATURE (37): Xaa equals any of the twenty naturally occurring L-amino acids
  MISC_FEATURE (38): Xaa equals any of the twenty naturally occurring L-amino acids
  MISC_FEATURE (39): Xaa equals any of the twenty naturally occurring L-amino acids
  MISC_FEATURE (43): Xaa equals any of the twenty naturally occurring L-amino acids
ALXGXLECLGPKTXXDXGXERXXXNGVXXXQGVLEQXXXEGGXGLGVPNSKDHWGKTFPKGP

SEQ ID NO: 3855 - protein, 192 aa, Homo sapiens
  MISC_FEATURE (115): Xaa equals any of the twenty naturally occurring L-amino acids
  MISC_FEATURE (136): Xaa equals any of the twenty naturally occurring L-amino acids
  MISC_FEATURE (141): Xaa equals any of the twenty naturally occurring L-amino acids
  MISC_FEATURE (156): Xaa equals any of the twenty naturally occurring L-amino acids
  MISC_FEATURE (161): Xaa equals any of the twenty naturally occurring L-amino acids
  MISC_FEATURE (162): Xaa equals any of the twenty naturally occurring L-amino acids
  MISC_FEATURE (165): Xaa equals any of the twenty naturally occurring L-amino acids
  MISC_FEATURE (185): Xaa equals any of the twenty naturally occurring L-amino acids
GRVGGERGEHAMKASGTLREYKVVGRCLPTPKCHTPPLYRMRIFAPNHVVAKSRFWYFVSQLKKMKKSSGEIVYCGQVFEKSPLRVKNFGIWLRYDSRSGTHNMYREYRDLTTAXAVTQCYPRHGCPAPRPTHSIXIMKVXEDRGQQVPVGGCQAXFTNFXXQVXRCPTGVLAPVSTKPRFNHPXKALTPFF

SEQ ID NO: 3856 - protein, 157 aa, Homo sapiens
  MISC_FEATURE (40): Xaa equals any of the twenty naturally occurring L-amino acids
  MISC_FEATURE (71): Xaa equals any of the twenty naturally occurring L-amino acids
  MISC_FEATURE (95): Xaa equals any of the twenty naturally occurring L-amino acids
  MISC_FEATURE (112): Xaa equals any of the twenty naturally occurring L-amino acids
  MISC_FEATURE (123): Xaa equals any of the twenty naturally occurring L-amino acids
  MISC_FEATURE (124): Xaa equals any of the twenty naturally occurring L-amino acids
  MISC_FEATURE (131): Xaa equals any of the twenty naturally occurring L-amino acids
  MISC_FEATURE (137): Xaa equals any of the twenty naturally occurring L-amino acids
  MISC_FEATURE (138): Xaa equals any of the twenty naturally occurring L-amino acids
  MISC_FEATURE (147): Xaa equals any of the twenty naturally occurring L-amino acids
  MISC_FEATURE (152): Xaa equals any of the twenty naturally occurring L-amino acids
ALDFENEMATAASSSSLEKSYELPDGQVITIGNERFRCPXTLFQPSFIGMESAGIHETTYNSIMKCDIDIXKDLYANNVLSGGTTMYPGIADRMXKGDPGLAPNTMKDQEHXPFGAQILCLDXXGSSWASXVHPFSXXGISQTGIPXKPGAXPLVHP

SEQ ID NO: 3857 - protein, 75 aa, Homo sapiens
  MISC_FEATURE (7): Xaa equals any of the twenty naturally occurring L-amino acids
  MISC_FEATURE (10): Xaa equals any of the twenty naturally occurring L-amino acids
KEEAIRXLQXKICELQARLQAQEEQHQEVQKAKEADIEKLNQALCLRYKNEKELQEVIQQQNEKILEQIDKSGSS

SEQ ID NO: 3858 - protein, 73 aa, Homo sapiens
  MISC_FEATURE (21): Xaa equals any of the twenty naturally occurring L-amino acids
  MISC_FEATURE (29): Xaa equals any of the twenty naturally occurring L-amino acids
  MISC_FEATURE (42): Xaa equals any of the twenty naturally occurring L-amino acids
  MISC_FEATURE (51): Xaa equals any of the twenty naturally occurring L-amino acids
  MISC_FEATURE (52): Xaa equals any of the twenty naturally occurring L-amino acids
  MISC_FEATURE (63): Xaa equals any of the twenty naturally occurring L-amino acids
  MISC_FEATURE (71): Xaa equals any of the twenty naturally occurring L-amino acids
  MISC_FEATURE (72): Xaa equals any of the twenty naturally occurring L-amino acids
PRITALFIESELWVFFQKILXSDIHIKQXTLLELTNYPHFMXFKWQLTDPXXWPVLGCMHFQXSNKAASLXXG

SEQ ID NO: 3859 - protein, 56 aa, Homo sapiens
VKAFPTGSEKATAVISSLLSDIIPQFSLPTSIQSDNRPAFISQISQAVFQALSRFQ

SEQ ID NO: 3860 - protein, 60 aa, Homo sapiens
  MISC_FEATURE (7): Xaa equals any of the twenty naturally occurring L-amino acids
  MISC_FEATURE (11): Xaa equals any of the twenty naturally occurring L-amino acids
  MISC_FEATURE (14): Xaa equals any of the twenty naturally occurring L-amino acids
  MISC_FEATURE (26): Xaa equals any of the twenty naturally occurring L-amino acids
  MISC_FEATURE (35): Xaa equals any of the twenty naturally occurring L-amino acids
  MISC_FEATURE (40): Xaa equals any of the twenty naturally occurring L-amino acids
  MISC_FEATURE (41): Xaa equals any of the twenty naturally occurring L-amino acids
  MISC_FEATURE (43): Xaa equals any of the twenty naturally occurring L-amino acids
  MISC_FEATURE (51): Xaa equals any of the twenty naturally occurring L-amino acids
  MISC_FEATURE (54): Xaa equals any of the twenty naturally occurring L-amino acids
  MISC_FEATURE (59): Xaa equals any of the twenty naturally occurring L-amino acids
QGTGHLXVKVXTDXNSLGRKTHSLPXTGKATHAHXPAYAXXRXQLHVLYTXKHXWFQEXR

SEQ ID NO: 3861 - protein, 57 aa, Homo sapiens
PASLSTNEAEHEMSLFSFQKPLNVTVIRRGGKHQLRLVPTRWAGKGLLGCNIIPLQR

SEQ ID NO: 3862 - protein, 90 aa, Homo sapiens
  MISC_FEATURE (2): Xaa equals any of the twenty naturally occurring L-amino acids
  MISC_FEATURE (5): Xaa equals any of the twenty naturally occurring L-amino acids
  MISC_FEATURE (12): Xaa equals any of the twenty naturally occurring L-amino acids
GXAFXALLPRKXFSDFLTNEFLHTFIGVFRQLTHIENELLYIFLYSLYKCMSDCTCNNIVMNGCAVGPALLCLVRGIAYHEPLSILGISS

SEQ ID NO: 3863 - protein, 154 aa, Homo sapiens
  MISC_FEATURE (6): Xaa equals any of the twenty naturally occurring L-amino acids
  MISC_FEATURE (149): Xaa equals any of the twenty naturally occurring L-amino acids
IASGRXRGSKLTYACMRRHSSSIVSPKFNSLAVVLQRRDWENPGVTQLNRLAAHPPFASWRNSEEARTDRPSQQLRSLNGEWDAPCSGALSAAGVVVTRSVTATLASALAPAPFAFFPSFLATFAGFPRQALNRGLPLGFRFSALRHLXPKKLD

SEQ ID NO: 3864 - protein, 78 aa, Homo sapiens
  MISC_FEATURE (8): Xaa equals any of the twenty naturally occurring L-amino acids
  MISC_FEATURE (27): Xaa equals any of the twenty naturally occurring L-amino acids
  MISC_FEATURE (38): Xaa equals any of the twenty naturally occurring L-amino acids
  MISC_FEATURE (54): Xaa equals any of the twenty naturally occurring L-amino acids
  MISC_FEATURE (63): Xaa equals any of the twenty naturally occurring L-amino acids
  MISC_FEATURE (64): Xaa equals any of the twenty naturally occurring L-amino acids
  MISC_FEATURE (67): Xaa equals any of the twenty naturally occurring L-amino acids
GKLVRLQXPVRNSRVDPRVRPRVRASXARGAAALRRSXNQPVAFVRRIPWTAAXSQLKEHFAXXGHXRRGILPFDKET

SEQ ID NO: 3865 - protein, 47 aa, Homo sapiens
  MISC_FEATURE (14): Xaa equals any of the twenty naturally occurring L-amino acids
  MISC_FEATURE (17): Xaa equals any of the twenty naturally occurring L-amino acids
  MISC_FEATURE (19): Xaa equals any of the twenty naturally occurring L-amino acids
  MISC_FEATURE (36): Xaa equals any of the twenty naturally occurring L-amino acids
  MISC_FEATURE (38): Xaa equals any of the twenty naturally occurring L-amino acids
  MISC_FEATURE (39): Xaa equals any of the twenty naturally occurring L-amino acids
  MISC_FEATURE (44): Xaa equals any of the twenty naturally occurring L-amino acids
DNKFEKSTSISITXKIXEXKDRMLKADREKRHYYQXSXXYLTAXFSI

SEQ ID NO: 3866 - protein, 31 aa, Homo sapiens
  MISC_FEATURE (5): Xaa equals any of the twenty naturally occurring L-amino acids
  MISC_FEATURE (9): Xaa equals any of the twenty naturally occurring L-amino acids
  MISC_FEATURE (26): Xaa equals any of the twenty naturally occurring L-amino acids
LYALXMSGXIVACLSSLPLGVFCWTXVIFKC

SEQ ID NO: 3867 - protein, 27 aa, Homo sapiens
  MISC_FEATURE (4): Xaa equals any of the twenty naturally occurring L-amino acids
  MISC_FEATURE (7): Xaa equals any of the twenty naturally occurring L-amino acids
  MISC_FEATURE (11): Xaa equals any of the twenty naturally occurring L-amino acids
TGTXGPXGGRXYAVKAFNITGNFYRNK

SEQ ID NO: 3868 - protein, 121 aa, Homo sapiens
PRVRADDYEHARFQKAKEQLEIRHRNRMDRVKKEWEEAELQAKNLPKAERQTLIQHFQAMVKALEKEAASEKQQLVETHLARVEAMLNDRRRMALENYLLPCSLTRTGSSHSPGLTALCPC

SEQ ID NO: 3869 - protein, 102 aa, Homo sapiens
  MISC_FEATURE (8): Xaa equals any of the twenty naturally occurring L-amino acids
  MISC_FEATURE (88): Xaa equals any of the twenty naturally occurring L-amino acids
  MISC_FEATURE (93): Xaa equals any of the twenty naturally occurring L-amino acids
  MISC_FEATURE (101): Xaa equals any of the twenty naturally occurring L-amino acids
KKKGGRSXGSKLTYACMRRHSSSIVSPKFNSLAVVLQRRDWENPGVTQLNRLAAHPPFASWRNSEKARTDRPSQQVAQPEWRMGRALXRRIKXGGCGGYPXV

SEQ ID NO: 3870 - protein, 77 aa, Homo sapiens
  MISC_FEATURE (1): Xaa equals any of the twenty naturally occurring L-amino acids
XHCCVLKSCRVRVLPCVFCSHRDLLHKERDLHLGLIRDCRNFFCKGPDSKYLQLYGPHLICFCSEKAATDNIHSNRE

SEQ ID NO: 3871 - protein, 78 aa, Homo sapiens
  MISC_FEATURE (42): Xaa equals any of the twenty naturally occurring L-amino acids
  MISC_FEATURE (45): Xaa equals any of the twenty naturally occurring L-amino acids
  MISC_FEATURE (46): Xaa equals any of the twenty naturally occurring L-amino acids
  MISC_FEATURE (53): Xaa equals any of the twenty naturally occurring L-amino acids
  MISC_FEATURE (64): Xaa equals any of the twenty naturally occurring L-amino acids
  MISC_FEATURE (71): Xaa equals any of the twenty naturally occurring L-amino acids
  MISC_FEATURE (77): Xaa equals any of the twenty naturally occurring L-amino acids
EAWWHFSFIPSIKEESQANLWGLGSTTSFSLPGIQMVPISWXEMXXPKTHTKXFRKVARVQPRXLADLRSXFLPYGXG

SEQ ID NO: 3872 - protein, 67 aa, Homo sapiens
  MISC_FEATURE (51): Xaa equals any of the twenty naturally occurring L-amino acids
  MISC_FEATURE (61): Xaa equals any of the twenty naturally occurring L-amino acids
  MISC_FEATURE (64): Xaa equals any of the twenty naturally occurring L-amino acids
  MISC_FEATURE (65): Xaa equals any of the twenty naturally occurring L-amino acids
SSSHCHLPPLSRKRLVVLTPLYPEPHSATKLLQECYEACRIWDACSVLFPXVGGCYVAVWXMAXXVT

SEQ ID NO: 3873 - protein, 53 aa, Homo sapiens
  MISC_FEATURE (50): Xaa equals any of the twenty naturally occurring L-amino acids
  MISC_FEATURE (51): Xaa equals any of the twenty naturally occurring L-amino acids
  MISC_FEATURE (52): Xaa equals any of the twenty naturally occurring L-amino acids
  MISC_FEATURE (53): Xaa equals any of the twenty naturally occurring L-amino acids
FMILSNSVTDSFQFWILFLEQLLLYSLHSIQIHLSCYERGFAGHRGSHCXXXX

SEQ ID NO: 3874 - protein, 50 aa, Homo sapiens
  MISC_FEATURE (25): Xaa equals any of the twenty naturally occurring L-amino acids
  MISC_FEATURE (36): Xaa equals any of the twenty naturally occurring L-amino acids
  MISC_FEATURE (44): Xaa equals any of the twenty naturally occurring L-amino acids
  MISC_FEATURE (47): Xaa equals any of the twenty naturally occurring L-amino acids
KYKCFNSVCTIQIKTNQLISYCKLXQFSITYVFVQXSAEHWKYXIGXLKI

SEQ ID NO: 3875 - protein, 65 aa, Homo sapiens
  MISC_FEATURE (50): Xaa equals any of the twenty naturally occurring L-amino acids
  MISC_FEATURE (52): Xaa equals any of the twenty naturally occurring L-amino acids
  MISC_FEATURE (60): Xaa equals any of the twenty naturally occurring L-amino acids
QASIVPFSSEKHLNAFLNTAQPQSQVLRTVNVSKICLLSAIMCLRLKTKXKXFIVLFGIXWTWDH

SEQ ID NO: 3876 - protein, 60 aa, Homo sapiens
  MISC_FEATURE (54): Xaa equals any of the twenty naturally occurring L-amino acids
TQMAAPSHHSKPWGLPAKFSSDTKASPGLFREMMQGHLRSLEAQFWPLFGGGLXLGTGET

SEQ ID NO: 3877 - protein, 47 aa, Homo sapiens
  MISC_FEATURE (5): Xaa equals any of the twenty naturally occurring L-amino acids
  MISC_FEATURE (6): Xaa equals any of the twenty naturally occurring L-amino acids
  MISC_FEATURE (8): Xaa equals any of the twenty naturally occurring L-amino acids
  MISC_FEATURE (27): Xaa equals any of the twenty naturally occurring L-amino acids
  MISC_FEATURE (28): Xaa equals any of the twenty naturally occurring L-amino acids
NLRFXXRXNARRYRSGIPGSTHASGTXXLSLPSHRHSDTLTNTVVYS

SEQ ID NO: 3878 - protein, 70 aa, Homo sapiens
  MISC_FEATURE (4): Xaa equals any of the twenty naturally occurring L-amino acids
  MISC_FEATURE (20): Xaa equals any of the twenty naturally occurring L-amino acids
  MISC_FEATURE (64): Xaa equals any of the twenty naturally occurring L-amino acids
TSNXSKERVEAVNMAEGIIXDTETKMEEFKDQLPADECNKLKEEISKMRELLARKDSETGENIXQAACSL

SEQ ID NO: 3879 - protein, 131 aa, Homo sapiens
  MISC_FEATURE (81): Xaa equals any of the twenty naturally occurring L-amino acids
AFEQLQRQRQHPAAAPAVPVRCFTFCFTDIVIMPKRKSPENTEGKDGSKVTKQEPTRRSARLSAKPAPPKPEPKPRKTSAXKEPGAKISRGAKGKKEEKQEAGKEGTAPSENGETKAEEAQKTESVDNEGE

SEQ ID NO: 3880 - protein, 96 aa, Homo sapiens
  MISC_FEATURE (50): Xaa equals any of the twenty naturally occurring L-amino acids
PDGLFFSSSWGGPRGSGAPSPLRRGPRVRLARPQPRDRRRHNVAGTPGVXLRKWKKSQGRKEGAEASPRAEPGGSVAWECWPEASMPRQRDGHADV

SEQ ID NO: 3881 - protein, 103 aa, Homo sapiens
  MISC_FEATURE (68): Xaa equals any of the twenty naturally occurring L-amino acids
  MISC_FEATURE (87): Xaa equals any of the twenty naturally occurring L-amino acids
  MISC_FEATURE (88): Xaa equals any of the twenty naturally occurring L-amino acids
  MISC_FEATURE (89): Xaa equals any of the twenty naturally occurring L-amino acids
  MISC_FEATURE (102): Xaa equals any of the twenty naturally occurring L-amino acids
VTWVCQARLGGSGVWKSTLQMRFPLLPHLQAPCSLFLSFVLDLFKNQISICVTSTVAFLICLVTATPXQLFPFPGGCARQLEPVTWXXXGPIRGWGRRHIGXV

SEQ ID NO: 3882 - protein, 50 aa, Homo sapiens
GGIFSFPNPFPPSSIRRGFQVYKQVCASCHSMDFVAYRTWWACATRKDES

SEQ ID NO: 3883 - protein, 40 aa, Homo sapiens
  MISC_FEATURE (2): Xaa equals any of the twenty naturally occurring L-amino acids
  MISC_FEATURE (4): Xaa equals any of the twenty naturally occurring L-amino acids
  MISC_FEATURE (7): Xaa equals any of the twenty naturally occurring L-amino acids
  MISC_FEATURE (11): Xaa equals any of the twenty naturally occurring L-amino acids
  MISC_FEATURE (18): Xaa equals any of the twenty naturally occurring L-amino acids
  MISC_FEATURE (27): Xaa equals any of the twenty naturally occurring L-amino acids
  MISC_FEATURE (36): Xaa equals any of the twenty naturally occurring L-amino acids
  MISC_FEATURE (37): Xaa equals any of the twenty naturally occurring L-amino acids
AXKXHDXLHLXLIQERPXYDTYVLVNXGLDRYEMWXXYGK

SEQ ID NO: 3884 - protein, 56 aa, Homo sapiens
  MISC_FEATURE (3): Xaa equals any of the twenty naturally occurring L-amino acids
  MISC_FEATURE (6): Xaa equals any of the twenty naturally occurring L-amino acids
  MISC_FEATURE (7): Xaa equals any of the twenty naturally occurring L-amino acids
  MISC_FEATURE (19): Xaa equals any of the twenty naturally occurring L-amino acids
  MISC_FEATURE (22): Xaa equals any of the twenty naturally occurring L-amino acids
  MISC_FEATURE (37): Xaa equals any of the twenty naturally occurring L-amino acids
  MISC_FEATURE (43): Xaa equals any of the twenty naturally occurring L-amino acids
  MISC_FEATURE (54): Xaa equals any of the twenty naturally occurring L-amino acids
ACXLVXXRSGVEEVGWDDXEIXSKTKLAQGVLQAVMXFNQSAXFFFVQMILIIXMH

SEQ ID NO: 3885 - protein, 34 aa, Homo sapiens
  MISC_FEATURE (4): Xaa equals any of the twenty naturally occurring L-amino acids
  MISC_FEATURE (10): Xaa equals any of the twenty naturally occurring L-amino acids
  MISC_FEATURE (25): Xaa equals any of the twenty naturally occurring L-amino acids
  MISC_FEATURE (33): Xaa equals any of the twenty naturally occurring L-amino acids
ALTXMMTQKXHLLIGQLGMMYSCFXHLVTDPDXD

SEQ ID NO: 3886 - protein, 81 aa, Homo sapiens
  MISC_FEATURE (1): Xaa equals any of the twenty naturally occurring L-amino acids
  MISC_FEATURE (10): Xaa equals any of the twenty naturally occurring L-amino acids
  MISC_FEATURE (28): Xaa equals any of the twenty naturally occurring L-amino acids
XSFTIGFGGXAPRYRSGIPGSTHASGKXLWIPFHFHSCVVSKAPLEIYLVLVVFFGSFSENCKPRLTCSTENVGSVQIPVL

SEQ ID NO: 3887 - protein, 77 aa, Homo sapiens
  MISC_FEATURE (21): Xaa equals any of the twenty naturally occurring L-amino acids
  MISC_FEATURE (66): Xaa equals any of the twenty naturally occurring L-amino acids
  MISC_FEATURE (74): Xaa equals any of the twenty naturally occurring L-amino acids
  MISC_FEATURE (77): Xaa equals any of the twenty naturally occurring L-amino acids
TLIFKQKKKKKGGRSRGSKLXYACMRRHSSSIVSPKFNSLAVVLQRRDWENPGVTQLNRLAAHPPXPAGCNRRXGPX

SEQ ID NO: 3888 - protein, 50 aa, Homo sapiens
  MISC_FEATURE (12): Xaa equals any of the twenty naturally occurring L-amino acids
  MISC_FEATURE (22): Xaa equals any of the twenty naturally occurring L-amino acids
  MISC_FEATURE (35): Xaa equals any of the twenty naturally occurring L-amino acids
  MISC_FEATURE (37): Xaa equals any of the twenty naturally occurring L-amino acids
  MISC_FEATURE (39): Xaa equals any of the twenty naturally occurring L-amino acids
  MISC_FEATURE (46): Xaa equals any of the twenty naturally occurring L-amino acids
TVYYDSSSVFLXSRRKPLCPLXGTGLISDIQRDIXIXTXIEKKRLXELCL

SEQ ID NO: 3889 - protein, 37 aa, Homo sapiens
  MISC_FEATURE (8): Xaa equals any of the twenty naturally occurring L-amino acids
  MISC_FEATURE (17): Xaa equals any of the twenty naturally occurring L-amino acids
  MISC_FEATURE (25): Xaa equals any of the twenty naturally occurring L-amino acids
  MISC_FEATURE (28): Xaa equals any of the twenty naturally occurring L-amino acids
PLLPCSWXFGSSFTLPXIMTDGVQXPSXPYPVQRTLL

SEQ ID NO: 3890 - protein, 118 aa, Homo sapiens
  MISC_FEATURE (1): Xaa equals any of the twenty naturally occurring L-amino acids
  MISC_FEATURE (7): Xaa equals any of the twenty naturally occurring L-amino acids
  MISC_FEATURE (15): Xaa equals any of the twenty naturally occurring L-amino acids
  MISC_FEATURE (30): Xaa equals any of the twenty naturally occurring L-amino acids
  MISC_FEATURE (44): Xaa equals any of the twenty naturally occurring L-amino acids
  MISC_FEATURE (45): Xaa equals any of the twenty naturally occurring L-amino acids
  MISC_FEATURE (46): Xaa equals any of the twenty naturally occurring L-amino acids
  MISC_FEATURE (49): Xaa equals any of the twenty naturally occurring L-amino acids
  MISC_FEATURE (51): Xaa equals any of the twenty naturally occurring L-amino acids
  MISC_FEATURE (52): Xaa equals any of the twenty naturally occurring L-amino acids
  MISC_FEATURE (56): Xaa equals any of the twenty naturally occurring L-amino acids
  MISC_FEATURE (59): Xaa equals any of the twenty naturally occurring L-amino acids
  MISC_FEATURE (60): Xaa equals any of the twenty naturally occurring L-amino acids
  MISC_FEATURE (65): Xaa equals any of the twenty naturally occurring L-amino acids
  MISC_FEATURE (67): Xaa equals any of the twenty naturally occurring L-amino acids
  MISC_FEATURE (68): Xaa equals any of the twenty naturally occurring L-amino acids
  MISC_FEATURE (69): Xaa equals any of the twenty naturally occurring L-amino acids
  MISC_FEATURE (71): Xaa equals any of the twenty naturally occurring L-amino acids
  MISC_FEATURE (74): Xaa equals any of the twenty naturally occurring L-amino acids
  MISC_FEATURE (75): Xaa equals any of the twenty naturally occurring L-amino acids
  MISC_FEATURE (77): Xaa equals any of the twenty naturally occurring L-amino acids
  MISC_FEATURE (90): Xaa equals any of the twenty naturally occurring L-amino acids
  MISC_FEATURE (96): Xaa equals any of the twenty naturally occurring L-amino acids
  MISC_FEATURE (103): Xaa equals any of the twenty naturally occurring L-amino acids
  MISC_FEATURE (106): Xaa equals any of the twenty naturally occurring L-amino acids
  MISC_FEATURE (108): Xaa equals any of the twenty naturally occurring L-amino acids
  MISC_FEATURE (111): Xaa equals any of the twenty naturally occurring L-amino acids
  MISC_FEATURE (117): Xaa equals any of the twenty naturally occurring L-amino acids
  MISC_FEATURE (118): Xaa equals any of the twenty naturally occurring L-amino acids
XLCTKPXPDSKTGPXRQWELRPHSAQGHLXSSRVCARPAVDGRXXXVPXAXXSPFXSDXXHSPQXPXXXAXSQXXRXTVTPSSGLSSNTXHSKPGXASQMSHXMIXPXQTXPPWSSXX

SEQ ID NO: 3891 - protein, 132 aa, Homo sapiens
  MISC_FEATURE (3): Xaa equals any of the twenty naturally occurring L-amino acids
  MISC_FEATURE (24): Xaa equals any of the twenty naturally occurring L-amino acids
  MISC_FEATURE (31): Xaa equals any of the twenty naturally occurring L-amino acids
  MISC_FEATURE (47): Xaa equals any of the twenty naturally occurring L-amino acids
  MISC_FEATURE (49): Xaa equals any of the twenty naturally occurring L-amino acids
  MISC_FEATURE (50): Xaa equals any of the twenty naturally occurring L-amino acids
  MISC_FEATURE (54): Xaa equals any of the twenty naturally occurring L-amino acids
  MISC_FEATURE (55): Xaa equals any of the twenty naturally occurring L-amino acids
  MISC_FEATURE (61): Xaa equals any of the twenty naturally occurring L-amino acids
  MISC_FEATURE (63): Xaa equals any of the twenty naturally occurring L-amino acids
  MISC_FEATURE (65): Xaa equals any of the twenty naturally occurring L-amino acids
  MISC_FEATURE (96): Xaa equals any of the twenty naturally occurring L-amino acids
  MISC_FEATURE (100): Xaa equals any of the twenty naturally occurring L-amino acids
  MISC_FEATURE (120): Xaa equals any of the twenty naturally occurring L-amino acids
  MISC_FEATURE (132): Xaa equals any of the twenty naturally occurring L-amino acids
FPXRGPFGPKGVPPPGGSPRGKKXFPPGGGXPGNPLFGLGKGGGETXPXXRGKXXKNFWGXFXKXLGVKLGNFFKKKKGNFKFPGGVKERFLTPFXPGNXLKKKGGKKGGIFLTTEKIGXETPLKRGFLGGX

SEQ ID NO: 3892 - protein, 192 aa, Homo sapiens
AFFPSPPPTGSPELKTAEIEPKADGSWREGDEVTLICSARGHPDPKLSWSQLGGSPAEPIPGRQGWVSSSLTLKVTSALSRDGISCEASNPHGNKRHVFHFGAVSPQTSQAGVAVMAVAVSVGLLLLVVAVFYCVRRKGGPCCRQRREKGAPPPGEPGLSHSGSEQPEQTGLLMGGASGGARGGSGGFGDEC

SEQ ID NO: 3893 - protein, 62 aa, Homo sapiens
GEPCALCSLHSIGKIGGAQNRSYSKLLCGLLAERLRISPDRVYINYYDMNAANVGWNNSTFA

SEQ ID NO: 3894 - protein, 212 aa, Homo sapiens
  MISC_FEATURE (176): Xaa equals any of the twenty naturally occurring L-amino acids
  MISC_FEATURE (188): Xaa equals any of the twenty naturally occurring L-amino acids
  MISC_FEATURE (196): Xaa equals any of the twenty naturally occurring L-amino acids
RETFTMSGALDVLQMKEEDVLKFLAAGTHLGGTNLDFQMEQYIYKRKSDGIYIINLKRTWEKLLLAARAIVAIENPADVSVISSRNTGQRAVLKFAAATGATPIAGRFTPGTFTNQIQAAFREPRLLVVTDPRADHQPLTEASYVNLPTIALCNTDSPLRYVDIAIPCNNKGAHSXGLDVVDAGSGKXCAMRGTIXREHPMGRSCLDLDLLQ

SEQ ID NO: 3895 - protein, 76 aa, Homo sapiens
TWLPLSGARSESAQSKMLSGVGGFVLGLLFLGAGLFIYFRNQKGEEPLVAGCLHTLFWRRNYGFAEVGSQHMNGPG

SEQ ID NO: 3896 - protein, 124 aa, Homo sapiens
TPTLPRPLPLPAPSRIFWRTVRGMLPHKTKRGQAALDRLKVFDGIPPPYDKKKRMVVPAALKVVRLKPTRKFAYLGRLAHEVGWKYQAVTATLEEKRKEKAKIHYRKKKQLMRLRKQAREDVEK

SEQ ID NO: 3897 - protein, 122 aa, Homo sapiens
AQEGERPSQSGPHPAPVVLHPSLPGPAGPCKVPPPKTLGPAGPKAELGLPYFAHWIQVLLHSFLLTPVGVQGLEKRTDLCSYFHTFPVQSGVGVLRRYPIHSIPHPLRGECVFACFLCCGGR

SEQ ID NO: 3898 - protein, 162 aa, Homo sapiens
LALLLVVALPRVWTDANLTARQRDPEDSQRTDEGDNRVWCHVCERENTFECQNPRRCKWTEPYCVIAAVKIFPRFFMVAKQCSAGCAAMERPKPEEKRFLLEEPMPFFYLKCCKIRYCNLEGPPINSSVFKEYAGSMGESCGGLWLAILLLLASIAAGLSLS

SEQ ID NO: 3899 - protein, 56 aa, Homo sapiens
HTCSVPPPHAFPAFQPSPTLRLPSAPLQVHGLSLQDPCSTGPSTSPPLCSLFPRPS

SEQ ID NO: 3900 - protein, 135 aa, Homo sapiens
LVVHSLKDLPTVLPHSFTIGAICKRENPHDAVVFHPKFVGKTLETLPEKSVVGTSSLRRAAQLQRKFPHLEFRSIRGNLNTRLRKLDEQQEFSAIILATAGLQRMGWHNRVGQILHPEECMYAVGQVHLTREATW

SEQ ID NO: 3901 - protein, 63 aa, Homo sapiens
  MISC_FEATURE (31): Xaa equals any of the twenty naturally occurring L-amino acids
  MISC_FEATURE (40): Xaa equals any of the twenty naturally occurring L-amino acids
LSFFLSTQCSRPAYSHIYHPDIKEKTHFLGXVFNKRKLQXKILKTPNPLCALHSAPSHRCPHF

SEQ ID NO: 3902 - protein, 195 aa, Homo sapiens
  MISC_FEATURE (5): Xaa equals any of the twenty naturally occurring L-amino acids
  MISC_FEATURE (158): Xaa equals any of the twenty naturally occurring L-amino acids
  MISC_FEATURE (187): Xaa equals any of the twenty naturally occurring L-amino acids
GRFKXRKEREAELGARAKEFTNVYIKNFGEDMDDERLKDLFGKFGPALSVKVMTDESGKSKGFGFVSFERHEDAQKAVDEMNGKELNGKQIYVGRAQKKVERQTELKRKFEQMKQDRITRYQGGNLYVKNLDDGIDDERLRKEFSPFGTITSAKVMMXGGRSKGLGLDGSPPQKKPKAVTEMNGRNXAPSPWMEL

SEQ ID NO: 3903 - protein, 65 aa, Homo sapiens
KSLCSLKISVNLKEQKQDRTSGTLIRMIPNKSVICELSGLFGYFNLHIFSSYIGLYLWPCSSFQC

SEQ ID NO: 3904 - protein, 146 aa, Homo sapiens
  MISC_FEATURE (5): Xaa equals any of the twenty naturally occurring L-amino acids
  MISC_FEATURE (67): Xaa equals any of the twenty naturally occurring L-amino acids
  MISC_FEATURE (129): Xaa equals any of the twenty naturally occurring L-amino acids
  MISC_FEATURE (131): Xaa equals any of the twenty naturally occurring L-amino acids
  MISC_FEATURE (139): Xaa equals any of the twenty naturally occurring L-amino acids
  MISC_FEATURE (145): Xaa equals any of the twenty naturally occurring L-amino acids
AESAXMTERRVPFSLLRGPSWDPFRDWYPHSRLFDQAFGLPRLPEEWSQWLGGSSWPGYVRPLPPPXSRAPQWPRPLQPRAQPATQQRGLGDPAHCGPLAACPWMSTTSPRTKLTGQRPRMAWWKITGXHXGAGRNEAXVTSSRXL

SEQ ID NO: 3905 - protein, 67 aa, Homo sapiens
  MISC_FEATURE (1): Xaa equals any of the twenty naturally occurring L-amino acids
  MISC_FEATURE (17): Xaa equals any of the twenty naturally occurring L-amino acids
  MISC_FEATURE (19): Xaa equals any of the twenty naturally occurring L-amino acids
  MISC_FEATURE (31): Xaa equals any of the twenty naturally occurring L-amino acids
  MISC_FEATURE (32): Xaa equals any of the twenty naturally occurring L-amino acids
  MISC_FEATURE (40): Xaa equals any of the twenty naturally occurring L-amino acids
  MISC_FEATURE (43): Xaa equals any of the twenty naturally occurring L-amino acids
  MISC_FEATURE (46): Xaa equals any of the twenty naturally occurring L-amino acids
  MISC_FEATURE (64): Xaa equals any of the twenty naturally occurring L-amino acids
XTMGNHLTEMAPTVSSXLXHFQALRDVVIGXXSCWKDLPXLPXHDXGVCTECTHQRLHTEKIRXPLR

SEQ ID NO: 3906 - protein, 208 aa, Homo sapiens
  MISC_FEATURE (6): Xaa equals any of the twenty naturally occurring L-amino acids
  MISC_FEATURE (9): Xaa equals any of the twenty naturally occurring L-amino acids
  MISC_FEATURE (25): Xaa equals any of the twenty naturally occurring L-amino acids
  MISC_FEATURE (200): Xaa equals any of the twenty naturally occurring L-amino acids
RELTRXRFXGTRSGIPGSTHASGSXHKMPGEATETVPATEQELPQPQAETGSGTESDSDESVPELEEQDSTQATTQQAQLAAAAEIDEEPVSKAKQSRSEKKARKAMSKLGLRQVTGVTRVTIRKSKNILFVITKPDVYKSPASDTYIVFGEAKIEDLSQQAQLAAAEKFKVQGEAVSNIQENTQTPTVQEESEEEEVDXTGVGSLRT

SEQ ID NO: 3907 - protein, 223 aa, Homo sapiens
  MISC_FEATURE (1): Xaa equals any of the twenty naturally occurring L-amino acids
  MISC_FEATURE (7): Xaa equals any of the twenty naturally occurring L-amino acids
  MISC_FEATURE (23): Xaa equals any of the twenty naturally occurring L-amino acids
  MISC_FEATURE (174): Xaa equals any of the twenty naturally occurring L-amino acids
  MISC_FEATURE (211): Xaa equals any of the twenty naturally occurring L-amino acids
XTYQGTXPGTAPEFPGRPTRPGXYMGATCHACIGGTNVRNEMQKLQAEAPHIVVGTPGRVFDMLNRRYLSPKWIKMFVLDEADEMLSRGFKDQIYEIFQKLNTSIQVVLLSATMPTDVLEVTKKFMRDPIRILVKKEELTLEGIKQFYINVEREEWKLDTLCDLYETLTITQAXIFLNTRRKVDWLTEKMHARDFTVSALHGDMDQKERDXIMREFRQGQVVV

SEQ ID NO: 3908 - protein, 149 aa, Homo sapiens
  MISC_FEATURE (21): Xaa equals any of the twenty naturally occurring L-amino acids
  MISC_FEATURE (29): Xaa equals any of the twenty naturally occurring L-amino acids
  MISC_FEATURE (30): Xaa equals any of the twenty naturally occurring L-amino acids
  MISC_FEATURE (128): Xaa equals any of the twenty naturally occurring L-amino acids
RDTYRGTPAGTGPEFPGRPTXPAPVKKLXXKGGKKKKQVLKFTLDCTHPVEDGIMDAANFEQFLQERIKVNGKAGNLGGGVVTIERSKSKITVTSEVPFSKRYLKYLTKKYLKKNNLRDWLRVVANSXESYELRYFQINQDEEEEEDED

SEQ ID NO: 3909 - protein, 168 aa, Homo sapiens
  MISC_FEATURE (100): Xaa equals any of the twenty naturally occurring L-amino acids
GRGFSSLPLEPPRFPTFRSPLPAFFRHRRRRLPQAVSTEEKESYRMSAIQNLHSFDPFADASKGDDLLPAGTEDYIHIRIQQRNGRKTLTTVQGIADDYXKKKLVKAFKKKFACNGTVIEHPEYGEVIQLQGDQRKNICQFLVEIGLAKDDQAEGSWVLSACGSLKLK

SEQ ID NO: 3910 - protein, 92 aa, Homo sapiens
  MISC_FEATURE (85): Xaa equals any of the twenty naturally occurring L-amino acids
  MISC_FEATURE (87): Xaa equals any of the twenty naturally occurring L-amino acids
  MISC_FEATURE (88): Xaa equals any of the twenty naturally occurring L-amino acids
  MISC_FEATURE (91): Xaa equals any of the twenty naturally occurring L-amino acids
APSPVRGAMAPARLFALLLLFVGGVAESIRETEVIDPQDLLEGRYFSGALPDDEDVVGPGQESDDFELSGSGDLDDLEDFMIGLXVXXPWXL

SEQ ID NO: 3911 - protein, 103 aa, Homo sapiens
  MISC_FEATURE (13): Xaa equals any of the twenty naturally occurring L-amino acids
  MISC_FEATURE (15): Xaa equals any of the twenty naturally occurring L-amino acids
  MISC_FEATURE (26): Xaa equals any of the twenty naturally occurring L-amino acids
  MISC_FEATURE (39): Xaa equals any of the twenty naturally occurring L-amino acids
  MISC_FEATURE (56): Xaa equals any of the twenty naturally occurring L-amino acids
  MISC_FEATURE (59): Xaa equals any of the twenty naturally occurring L-amino acids
  MISC_FEATURE (73): Xaa equals any of the twenty naturally occurring L-amino acids
  MISC_FEATURE (74): Xaa equals any of the twenty naturally occurring L-amino acids
  MISC_FEATURE (78): Xaa equals any of the twenty naturally occurring L-amino acids
  MISC_FEATURE (80): Xaa equals any of the twenty naturally occurring L-amino acids
  MISC_FEATURE (97): Xaa equals any of the twenty naturally occurring L-amino acids
KYPSHKGNPRELXSXPRPWPFLKWWXTESWSGFLTFKWXKVPGNLAAVEESIVVGXLLXCFHAKVVCLYGNFXXPPSXKXLTGALSFFQYKKVAFPXKGVFLP

SEQ ID NO: 3912 - protein, 165 aa, Homo sapiens
  MISC_FEATURE (14): Xaa equals any of the twenty naturally occurring L-amino acids
  MISC_FEATURE (23): Xaa equals any of the twenty naturally occurring L-amino acids
  MISC_FEATURE (25): Xaa equals any of the twenty naturally occurring L-amino acids
  MISC_FEATURE (27): Xaa equals any of the twenty naturally occurring L-amino acids
  MISC_FEATURE (31): Xaa equals any of the twenty naturally occurring L-amino acids
  MISC_FEATURE (32): Xaa equals any of the twenty naturally occurring L-amino acids
  MISC_FEATURE (37): Xaa equals any of the twenty naturally occurring L-amino acids
  MISC_FEATURE (43): Xaa equals any of the twenty naturally occurring L-amino acids
  MISC_FEATURE (66): Xaa equals any of the twenty naturally occurring L-amino acids
  MISC_FEATURE (67): Xaa equals any of the twenty naturally occurring L-amino acids
  MISC_FEATURE (69): Xaa equals any of the twenty naturally occurring L-amino acids
  MISC_FEATURE (70): Xaa equals any of the twenty naturally occurring L-amino acids
  MISC_FEATURE (83): Xaa equals any of the twenty naturally occurring L-amino acids
  MISC_FEATURE (84): Xaa equals any of the twenty naturally occurring L-amino acids
  MISC_FEATURE (89): Xaa equals any of the twenty naturally occurring L-amino acids
  MISC_FEATURE (90): Xaa equals any of the twenty naturally occurring L-amino acids
  MISC_FEATURE (93): Xaa equals any of the twenty naturally occurring L-amino acids
  MISC_FEATURE (96): Xaa equals any of the twenty naturally occurring L-amino acids
  MISC_FEATURE (98): Xaa equals any of the twenty naturally occurring L-amino acids
  MISC_FEATURE (99): Xaa equals any of the twenty naturally occurring L-amino acids
  MISC_FEATURE (104): Xaa equals any of the twenty naturally occurring L-amino acids
  MISC_FEATURE (108): Xaa equals any of the twenty naturally occurring L-amino acids
  MISC_FEATURE (110): Xaa equals any of the twenty naturally occurring L-amino acids
  MISC_FEATURE (116): Xaa equals any of the twenty naturally occurring L-amino acids
  MISC_FEATURE (122): Xaa equals any of the twenty naturally occurring L-amino acids
  MISC_FEATURE (123): Xaa equals any of the twenty naturally occurring L-amino acids
  MISC_FEATURE (125): Xaa equals any of the twenty naturally occurring L-amino acids
  MISC_FEATURE (127): Xaa equals any of the twenty naturally occurring L-amino acids
  MISC_FEATURE (131): Xaa equals any of the twenty naturally occurring L-amino acids
  MISC_FEATURE (139): Xaa equals any of the twenty naturally occurring L-amino acids
  MISC_FEATURE (143): Xaa equals any of the twenty naturally occurring L-amino acids
  MISC_FEATURE (149): Xaa equals any of the twenty naturally occurring L-amino acids
  MISC_FEATURE (151): Xaa equals any of the twenty naturally occurring L-amino acids
  MISC_FEATURE (158): Xaa equals any of the twenty naturally occurring L-amino acids
  MISC_FEATURE (159): Xaa equals any of the twenty naturally occurring L-amino acids
  MISC_FEATURE (161): Xaa equals any of the twenty naturally occurring L-amino acids
ESLRYRSGIPGTTXVFARPLREXRXWXLPIXXPSTPXASSPWXMISPRSTTTTGSGMCKVRISTDXXPXXRLPLHRGAAPGTXXVMEGXXQKXSYXGXXAQSTXGILXLXYPIKDXIGTIWXXQXKXWFHXFTRSCTGXLRSXQTVDRXWXEPQGQSXXDXPDHV

SEQ ID NO: 3913 - protein, 142 aa, Homo sapiens
  MISC_FEATURE (95): Xaa equals any of the twenty naturally occurring L-amino acids
  MISC_FEATURE (101): Xaa equals any of the twenty naturally occurring L-amino acids
  MISC_FEATURE (111): Xaa equals any of the twenty naturally occurring L-amino acids
  MISC_FEATURE (140): Xaa equals any of the twenty naturally occurring L-amino acids
GTLTSVRSLENLGMEPPKMNPVVEPLSWMLGTWLSDPPGAGTYPTLQPFQYLEEVHISHVGQPMLNFSFNSFHPDTRKPMHRECGFIRLKPDTNXWPLQRXNTACGSGGGXVNGRSCASHPTPSPGSPSQGAHVEQIPGXSG

SEQ ID NO: 3914 - protein, 94 aa, Homo sapiens
  MISC_FEATURE (10): Xaa equals any of the twenty naturally occurring L-amino acids
  MISC_FEATURE (35): Xaa equals any of the twenty naturally occurring L-amino acids
  MISC_FEATURE (73): Xaa equals any of the twenty naturally occurring L-amino acids
  MISC_FEATURE (78): Xaa equals any of the twenty naturally occurring L-amino acids
IFADMLKNAXSNAELKGLDVDSLVIEHIQVNKAPXMRRRTYRAHGRINPYMSSPCHIEMILTEKEQIGPKPEXEVARXKRYPEETEKQKLMARE

SEQ ID NO: 3915 - protein, 136 aa, Homo sapiens
  MISC_FEATURE (3): Xaa equals any of the twenty naturally occurring L-amino acids
  MISC_FEATURE (5): Xaa equals any of the twenty naturally occurring L-amino acids
  MISC_FEATURE (13): Xaa equals any of the twenty naturally occurring L-amino acids
  MISC_FEATURE (128): Xaa equals any of the twenty naturally occurring L-amino acids
  MISC_FEATURE (131): Xaa equals any of the twenty naturally occurring L-amino acids
  MISC_FEATURE (132): Xaa equals any of the twenty naturally occurring L-amino acids
DGXCXRELLRHYXWDACTYRSGIPGSTHASDFPMRDGIDDESYGQIFKPIISKVMEMYQPSAVVLQCGADSLSGDRLGCFNLTVKGHAKCVEVVKTFNLPLLMLGGGGYTIRNVARCWTYETAVALDXENXXEVAI

SEQ ID NO: 3916 - protein, 223 aa, Homo sapiens
  MISC_FEATURE (180): Xaa equals any of the twenty naturally occurring L-amino acids
  MISC_FEATURE (181): Xaa equals any of the twenty naturally occurring L-amino acids
  MISC_FEATURE (189): Xaa equals any of the twenty naturally occurring L-amino acids
  MISC_FEATURE (190): Xaa equals any of the twenty naturally occurring L-amino acids
  MISC_FEATURE (198): Xaa equals any of the twenty naturally occurring L-amino acids
  MISC_FEATURE (216): Xaa equals any of the twenty naturally occurring L-amino acids
  MISC_FEATURE (218): Xaa equals any of the twenty naturally occurring L-amino acids
RRAMGISRDNWHKRRKTGGKRKPYHKKRKYELGRPAANTKIGPRRIHTVRVRGGNKKYRALRLDVGNFSWGSECCTRKTRIIDVVYNASNNELVRTKTLVKNCIVLIDSTPYRQWYESHYALPLGRKKGAKLTPEEEEILNKKRSKKIQKKYDERKKNAKIKQSSGGTSFSKASFLRASXXRPGQCGPXXMAFLKGKXSLGSSILRKNQGPAKGQXKXLGFGL

SEQ ID NO: 3917 - protein, 157 aa, Homo sapiens
  MISC_FEATURE (4): Xaa equals any of the twenty naturally occurring L-amino acids
  MISC_FEATURE (9): Xaa equals any of the twenty naturally occurring L-amino acids
  MISC_FEATURE (133): Xaa equals any of the twenty naturally occurring L-amino acids
  MISC_FEATURE (134): Xaa equals any of the twenty naturally occurring L-amino acids
  MISC_FEATURE (144): Xaa equals any of the twenty naturally occurring L-amino acids
LNGXLHACXHRSAIPGSTHASGEKPDEFESGISQALLELEMNSDLKAQLRELNITAAKEIEVGGGRKAIIIFVPVPQLKSFQKIQVRLVRELEKKFSGKHVVFIAQRRILPKPTRKSRTKNKQKRPGARTLTXXARWPSLRTWXSKRNCGQENPRQN

SEQ ID NO: 3918 - protein, 49 aa, Homo sapiens
VAENRGHTFWEILKEETIFNEMKIFNEFKKLMTILRKGLGCILLCNLIN

SEQ ID NO: 3919 - protein, 63 aa, Homo sapiens
KRGQAALDRLKVFDGIPPPYDKKKRMVVPAALKVVRLKPTRKFAYLGRLAHEVGWKYQAVTAT

SEQ ID NO: 3920 - protein, 61 aa, Homo sapiens
MRDSSIWAFVLGPYQPCLVPQCFVRPTEAKKAADEAKMRFAHIDGDHLTLLNVYHAFKQNH

SEQ ID NO: 3921 - protein, 173 aa, Homo sapiens
  MISC_FEATURE (156): Xaa equals any of the twenty naturally occurring L-amino acids
AEVQVLVLDGRGHLLGRLAAIVAKQVLLGRKVVVVRCEGINISGNFYRNKLKYLAFLRKRMNTNPSRGPYHFRAPSRIFWRTVRGMLPHKTKRGQAALDRLKVFDGIPPPYDKKKRMVVPAALKVVRLKPTRKFAYLGRLAHEVGWKYQAVTATLXEKRKEKARSTTGRRNSS

SEQ ID NO: 3922 - protein, 72 aa, Homo sapiens
  MISC_FEATURE (71): Xaa equals any of the twenty naturally occurring L-amino acids
DIYGKICFILFQSNNLLFMPSDFIILFGMRHTLQTNSSNTCILQIHRVLIGLRKLFKMLLIKCNFINGYNXV

SEQ ID NO: 3923 - protein, 119 aa, Homo sapiens
  MISC_FEATURE (75): Xaa equals any of the twenty naturally occurring L-amino acids
  MISC_FEATURE (79): Xaa equals any of the twenty naturally occurring L-amino acids
  MISC_FEATURE (112): Xaa equals any of the twenty naturally occurring L-amino acids
GREEARNPKRKPRLMEEDELPSWIIKDDAEVERLTCEEEEEKMFGRGSRHRKEVDYSDSLTEKQWLKAIEEGTLXGDRXGGPAEEIITEAQARQRRRLLHPDHQHPQPRQGXREQEAEE

SEQ ID NO: 3924 - protein, 93 aa, Homo sapiens
PGRRGCRPLRKMAPKAKEAPAHPKAEAKAKALKAKKAVLKGVRSHTQKRRSACHSPSGGPRHCDSGGSPDILGRAPPGETSLATMLSSSFRCH

SEQ ID NO: 3925 - protein, 209 aa, Homo sapiens
  MISC_FEATURE (196): Xaa equals any of the twenty naturally occurring L-amino acids
  MISC_FEATURE (204): Xaa equals any of the twenty naturally occurring L-amino acids
  MISC_FEATURE (207): Xaa equals any of the twenty naturally occurring L-amino acids
RLGSSAMAPSRKFFVGGNWKMNGRKQSLGELIGTLNAAKVPADTEVVCAPPTAYIDFARQKLDPKIAVAAQNCYKVTNGAFTGEISPGMIKDCGATWVVLGHSERRHVFGESDELIGQKVAHALAEGLGVIACIGEKLDEREAGITEKVVFEQTKVIADNVKDWSKVVLPMSLCGPLVLARLQHPTGPGSTREASXDGLNSNVXYAXVK

SEQ ID NO: 3926 - protein, 49 aa, Homo sapiens
  MISC_FEATURE (7): Xaa equals any of the twenty naturally occurring L-amino acids
  MISC_FEATURE (32): Xaa equals any of the twenty naturally occurring L-amino acids
FGRHFEXTDILVSKISRQSIDALKDWFRDEMXKSDWQLIVELKKVFEII

SEQ ID NO: 3927 - protein, 225 aa, Homo sapiens
  MISC_FEATURE (213): Xaa equals any of the twenty naturally occurring L-amino acids
  MISC_FEATURE (216): Xaa equals any of the twenty naturally occurring L-amino acids
  MISC_FEATURE (219): Xaa equals any of the twenty naturally occurring L-amino acids
  MISC_FEATURE (225): Xaa equals any of the twenty naturally occurring L-amino acids
SNLEEAKKKKEDALNETRESETKLKELPGVCNETMMALWEECKPCLKQTCMKFYARVCRSGSGLVGRQLEEFLNQSSPFYFWMNGDRIDSLLENDRQQTHMLDVMQDHFSRASSIIDELFQDRFFTREPQDTYHYLPFSLPHRRPHFFFPKSRIVRSLMPFSPYEPLNFHAMFQPFLEMIHEAQQAMDIHFHSPGFQHPQQNSYEKATMTGLXARXIRXTPRAAX

SEQ ID NO: 3928 - protein, 171 aa, Homo sapiens
FHFHIYQVGGVAFCGRIRFLSSTDFKRRAGGSGSQMHRRRSRSCREDQKPVMDDQRDLISNNEQLPMLGRRPGAPESKCSRGALYTGFSILVTLLLAGQATTAYFLYQQQGRLDKLTVTSQNLQLENLRMKLPKPPKPVSKMRMATPLLMQALPMGALPRGPCRMPPSMAT

SEQ ID NO: 3929 - protein, 240 aa, Homo sapiens
  MISC_FEATURE (227): Xaa equals any of the twenty naturally occurring L-amino acids
  MISC_FEATURE (238): Xaa equals any of the twenty naturally occurring L-amino acids
  MISC_FEATURE (240): Xaa equals any of the twenty naturally occurring L-amino acids
AQEPTTAFNLFVGNLNFNKSAPELKTGISDVFAKNDLAVVDVRIGMTRKFGYVDFESAEDLEKALELTGLKVFGNEIKLEKPKGKDSKKERDARTLLAKNLPYKVTQDELKEVFEDAAEIRLVSKDGKSKGIAYIEFKTEADAEKTFEEKQGTEIDGRSISLYYTGEKGQNQDYRGGKNSTWSGESKTLGLSNLSYSATRKKLFREVFGESNFYQSTPRTQNGKSKXVCLYRVGLHLXTX

SEQ ID NO: 3930 - protein, 125 aa, Homo sapiens
RMATPLLMQALPMGALPQGPMQNATKYGNMTEDHVMHLLQNADPLKVYPPLKGSFPENLRHLKNTMETIDWKVFESWMHHWLLFEMSRHSLEQKPTDAPPKESLELEDPSSGLGVTKQDLGPVPM

SEQ ID NO: 3931 - protein, 79 aa, Homo sapiens
  MISC_FEATURE (35): Xaa equals any of the twenty naturally occurring L-amino acids
  MISC_FEATURE (37): Xaa equals any of the twenty naturally occurring L-amino acids
  MISC_FEATURE (52): Xaa equals any of the twenty naturally occurring L-amino acids
  MISC_FEATURE (69): Xaa equals any of the twenty naturally occurring L-amino acids
  MISC_FEATURE (72): Xaa equals any of the twenty naturally occurring L-amino acids
WWDSFTLVTFYDQALRGKGRFFKKPSRGFLPISRXMXKKGKGVGLSVWVLLXNIAKQVWFQGTPLAWGXPFXVNSKKNS

SEQ ID NO: 3932 - protein, 82 aa, Homo sapiens
  MISC_FEATURE (1): Xaa equals any of the twenty naturally occurring L-amino acids
  MISC_FEATURE (8): Xaa equals any of the twenty naturally occurring L-amino acids
  MISC_FEATURE (10): Xaa equals any of the twenty naturally occurring L-amino acids
  MISC_FEATURE (19): Xaa equals any of the twenty naturally occurring L-amino acids
  MISC_FEATURE (69): Xaa equals any of the twenty naturally occurring L-amino acids
  MISC_FEATURE (70): Xaa equals any of the twenty naturally occurring L-amino acids
  MISC_FEATURE (79): Xaa equals any of the twenty naturally occurring L-amino acids
  MISC_FEATURE (80): Xaa equals any of the twenty naturally occurring L-amino acids
  MISC_FEATURE (81): Xaa equals any of the twenty naturally occurring L-amino acids
  MISC_FEATURE (82): Xaa equals any of the twenty naturally occurring L-amino acids
XCSEYRPXIXGEHPGLSIXDVAKKLGEMWNNTAADDKQPYEKKAAKLKEKYEKDIAAYRAKGKPDAAKXXVVKAEKSKXXXX

SEQ ID NO: 3933 - protein, 64 aa, Homo sapiens
  MISC_FEATURE (11): Xaa equals any of the twenty naturally occurring L-amino acids
  MISC_FEATURE (13): Xaa equals any of the twenty naturally occurring L-amino acids
  MISC_FEATURE (16): Xaa equals any of the twenty naturally occurring L-amino acids
  MISC_FEATURE (17): Xaa equals any of the twenty naturally occurring L-amino acids
  MISC_FEATURE (28): Xaa equals any of the twenty naturally occurring L-amino acids
  MISC_FEATURE (33): Xaa equals any of the twenty naturally occurring L-amino acids
  MISC_FEATURE (34): Xaa equals any of the twenty naturally occurring L-amino acids
  MISC_FEATURE (37): Xaa equals any of the twenty naturally occurring L-amino acids
  MISC_FEATURE (40): Xaa equals any of the twenty naturally occurring L-amino acids
  MISC_FEATURE (45): Xaa equals any of the twenty naturally occurring L-amino acids
  MISC_FEATURE (46): Xaa equals any of the twenty naturally occurring L-amino acids
  MISC_FEATURE (51): Xaa equals any of the twenty naturally occurring L-amino acids
  MISC_FEATURE (57): Xaa equals any of the twenty naturally occurring L-amino acids
LRDTHNSSPIXRXSYXXKKWSLLGPPAXIGTLXXFSXMLXKESTXXAQEVXKGLLGXLNGSMPW

SEQ ID NO: 3934 - protein, 137 aa, Homo sapiens
  MISC_FEATURE (15): Xaa equals any of the twenty naturally occurring L-amino acids
ANMGRVRTKTVKKAXRVIIEKYYTRLGNDFHTNKRVCEEIAIIPSKKLRNKIAGYVTHLMKRIQRGPVRGISIKLQEEERERRDNYVPEVSALDQEIIEVDPDTKEMLKLLDFGSLSNLQVTQPTVGMNFKTPRGPV

SEQ ID NO: 3935 - protein, 222 aa, Homo sapiens
  MISC_FEATURE (191): Xaa equals any of the twenty naturally occurring L-amino acids
  MISC_FEATURE (195): Xaa equals any of the twenty naturally occurring L-amino acids
  MISC_FEATURE (217): Xaa equals any of the twenty naturally occurring L-amino acids
GLPKMAEVQVLVLDGRGHLLGRLAAIVAKQVLLGRKVVVVRCEGINISGNFYRNKLKYLAFLRKRMNTNPSRGPYHFRAPSRIFWRTVRGMLPHKTKRGQAALDRLKVFDGIPPPYDKKKRMVVPAALKVVRLKPTRKFAYLGRLAHEVGWKYQAVTATLEEKRKEKAKIHYRKKKQLMRLPKQAQKNVEXKIDXYPEVLKNPRTSGLRPNKELVNXFKKKK

SEQ ID NO: 3936 - protein, 178 aa, Homo sapiens
  MISC_FEATURE (4): Xaa equals any of the twenty naturally occurring L-amino acids
  MISC_FEATURE (9): Xaa equals any of the twenty naturally occurring L-amino acids
  MISC_FEATURE (32): Xaa equals any of the twenty naturally occurring L-amino acids
  MISC_FEATURE (49): Xaa equals any of the twenty naturally occurring L-amino acids
  MISC_FEATURE (60): Xaa equals any of the twenty naturally occurring L-amino acids
  MISC_FEATURE (66): Xaa equals any of the twenty naturally occurring L-amino acids
  MISC_FEATURE (104): Xaa equals any of the twenty naturally occurring L-amino acids
  MISC_FEATURE (106): Xaa equals any of the twenty naturally occurring L-amino acids
  MISC_FEATURE (132): Xaa equals any of the twenty naturally occurring L-amino acids
  MISC_FEATURE (136): Xaa equals any of the twenty naturally occurring L-amino acids
  MISC_FEATURE (138): Xaa equals any of the twenty naturally occurring L-amino acids
  MISC_FEATURE (149): Xaa equals any of the twenty naturally occurring L-amino acids
  MISC_FEATURE (159): Xaa equals any of the twenty naturally occurring L-amino acids
  MISC_FEATURE (166): Xaa equals any of the twenty naturally occurring L-amino acids
  MISC_FEATURE (177): Xaa equals any of the twenty naturally occurring L-amino acids
KNLXFIPAXAMDGFWGNMADSSVAVWSGVNVXGVSLQELNPEMGTDNDXENWKEVHKMVXESAYEXIKLKGYTNWAIGLSVADLIESMLKNLSRIHPVSTMVKXMXGIENEVFLSLPCILNARGLTSAINQXLKDXEXAQLKKSANTLXDIQKDLKDLXLESSRLXKFKNYHGSNSXL

SEQ ID NO: 3937 - protein, 39 aa, Homo sapiens
LKIRSEFKRKYGKSLYYYIQQDTKGDYQKALLYLCGGDD

SEQ ID NO: 3938 - protein, 47 aa, Homo sapiens
SFILITALTREMISFFFIHCNEPLNMRHLAFICDDNWNSFFFFFAFN

SEQ ID NO: 3939 - protein, 46 aa, Homo sapiens
  MISC_FEATURE (9): Xaa equals any of the twenty naturally occurring L-amino acids
  MISC_FEATURE (11): Xaa equals any of the twenty naturally occurring L-amino acids
  MISC_FEATURE (23): Xaa equals any of the twenty naturally occurring L-amino acids
  MISC_FEATURE (31): Xaa equals any of the twenty naturally occurring L-amino acids
  MISC_FEATURE (43): Xaa equals any of the twenty naturally occurring L-amino acids
  MISC_FEATURE (46): Xaa equals any of the twenty naturally occurring L-amino acids
WGQTQNQQXGXHAAGSSRSMMGXSFLANKFXFLSKRALKRFQXIKX

SEQ ID NO: 3940 - protein, 24 aa, Homo sapiens
  MISC_FEATURE (10): Xaa equals any of the twenty naturally occurring L-amino acids
  MISC_FEATURE (18): Xaa equals any of the twenty naturally occurring L-amino acids
  MISC_FEATURE (19): Xaa equals any of the twenty naturally occurring L-amino acids
PGLGQSMIIXDDRMLLSXXVFNGS

SEQ ID NO: 3941 - protein, 102 aa, Homo sapiens
PQQREVLRRCVEVSISSVAFVRRIPWTAASSQLKEHFAQFGHVRRCILPFDKETGFHRGLGWVQFSSEEGLRNALQQENHIIDGERPGTLKATSNLYKEDFE

SEQ ID NO: 3942 - protein, 50 aa, Homo sapiens
  MISC_FEATURE (40): Xaa equals any of the twenty naturally occurring L-amino acids
  MISC_FEATURE (41): Xaa equals any of the twenty naturally occurring L-amino acids
  MISC_FEATURE (49): Xaa equals any of the twenty naturally occurring L-amino acids
CDFRLVSVCNEWPKFLILKMYSLNLIILLWIIMNEKPSLXXLKKKGPLXT

SEQ ID NO: 3943 - protein, 44 aa, Homo sapiens
SCTLKIYYNMYISKSNTCDFCFNSMNVPASLIFVFILFFSRVEV

SEQ ID NO: 3944 - protein, 36 aa, Homo sapiens
  MISC_FEATURE (2): Xaa equals any of the twenty naturally occurring L-amino acids
  MISC_FEATURE (3): Xaa equals any of the twenty naturally occurring L-amino acids
  MISC_FEATURE (28): Xaa equals any of the twenty naturally occurring L-amino acids
  MISC_FEATURE (35): Xaa equals any of the twenty naturally occurring L-amino acids
VXXLVILQPCVSAQCQSRWVIMKCQTSXINVLEFXG

SEQ ID NO: 3945 - protein, 49 aa, Homo sapiens
SRITPRHLQLAIRGDEELDSLIKATIAGGGVIPHIHKSLIGKKGQQKTV

SEQ ID NO: 3946 - protein, 111 aa, Homo sapiens
  MISC_FEATURE (22): Xaa equals any of the twenty naturally occurring L-amino acids
WYACRYRSGIPGSTHASGDMAXRTKKVGIVGKYGTRYGASLRKMVKKIEISQHAKYTCSFCGKTKMKRRAVGIWHCGSCMKTVAGGAWTYNTTSAVTVKSAIRRLKELKDQ

SEQ ID NO: 3947 - protein, 114 aa, Homo sapiens
NSGRGDLLYGCYTRPQINTEIVQNVTGPGQRTNMGILFMSKVGLRGDRRSEGDEVLDPLRQALDSSMQSHNLYQHPQRLAFHVSAPVASTVQQASGLLGPLPHLSSFALQPAHS

SEQ ID NO: 3948 - protein, 142 aa, Homo sapiens
  MISC_FEATURE (5): Xaa equals any of the twenty naturally occurring L-amino acids
  MISC_FEATURE (15): Xaa equals any of the twenty naturally occurring L-amino acids
  MISC_FEATURE (25): Xaa equals any of the twenty naturally occurring L-amino acids
  MISC_FEATURE (33): Xaa equals any of the twenty naturally occurring L-amino acids
  MISC_FEATURE (34): Xaa equals any of the twenty naturally occurring L-amino acids
  MISC_FEATURE (35): Xaa equals any of the twenty naturally occurring L-amino acids
  MISC_FEATURE (65): Xaa equals any of the twenty naturally occurring L-amino acids
  MISC_FEATURE (76): Xaa equals any of the twenty naturally occurring L-amino acids
  MISC_FEATURE (115): Xaa equals any of the twenty naturally occurring L-amino acids
  MISC_FEATURE (117): Xaa equals any of the twenty naturally occurring L-amino acids
  MISC_FEATURE (125): Xaa equals any of the twenty naturally occurring L-amino acids
  MISC_FEATURE (129): Xaa equals any of the twenty naturally occurring L-amino acids
  MISC_FEATURE (132): Xaa equals any of the twenty naturally occurring L-amino acids
  MISC_FEATURE (133): Xaa equals any of the twenty naturally occurring L-amino acids
  MISC_FEATURE (141): Xaa equals any of the twenty naturally occurring L-amino acids
RTRGXGCGVCCYSPXFAMPPKDDKXKKDAGKTXXXDKDPVNKSGGKAKKKKWSKGKVRYKLNNLXLFDKATYDKLXKEVPNYKLITPAVVSERLKIRGSLARAALQELLSKGLIXLXSKHRAQVXYTRXTKXXDAPAAGEXA

SEQ ID NO: 3949 - protein, 44 aa, Homo sapiens
  MISC_FEATURE (9): Xaa equals any of the twenty naturally occurring L-amino acids
  MISC_FEATURE (13): Xaa equals any of the twenty naturally occurring L-amino acids
  MISC_FEATURE (19): Xaa equals any of the twenty naturally occurring L-amino acids
  MISC_FEATURE (22): Xaa equals any of the twenty naturally occurring L-amino acids
  MISC_FEATURE (37): Xaa equals any of the twenty naturally occurring L-amino acids
  MISC_FEATURE (43): Xaa equals any of the twenty naturally occurring L-amino acids
TMTWNRQNXLWLXTSSTTXTLXSKKIQVTSIPSCKGXLFFFFXK

SEQ ID NO: 3950 - protein, 86 aa, Homo sapiens
  MISC_FEATURE (7): Xaa equals any of the twenty naturally occurring L-amino acids
  MISC_FEATURE (9): Xaa equals any of the twenty naturally occurring L-amino acids
  MISC_FEATURE (12): Xaa equals any of the twenty naturally occurring L-amino acids
  MISC_FEATURE (24): Xaa equals any of the twenty naturally occurring L-amino acids
  MISC_FEATURE (36): Xaa equals any of the twenty naturally occurring L-amino acids
  MISC_FEATURE (48): Xaa equals any of the twenty naturally occurring L-amino acids
  MISC_FEATURE (53): Xaa equals any of the twenty naturally occurring L-amino acids
  MISC_FEATURE (55): Xaa equals any of the twenty naturally occurring L-amino acids
  MISC_FEATURE (59): Xaa equals any of the twenty naturally occurring L-amino acids
  MISC_FEATURE (63): Xaa equals any of the twenty naturally occurring L-amino acids
  MISC_FEATURE (67): Xaa equals any of the twenty naturally occurring L-amino acids
  MISC_FEATURE (81): Xaa equals any of the twenty naturally occurring L-amino acids
  MISC_FEATURE (82): Xaa equals any of the twenty naturally occurring L-amino acids
SGTRSPXGXPRXRLYTSLPSEKLXTALVWTFWTDLXFAHNLVQSCNRXQPRKXYXWTLXHYRXLLAXNILDITADKNKNWXXRSVF

SEQ ID NO: 3951 - protein, 53 aa, Homo sapiens
  MISC_FEATURE (2): Xaa equals any of the twenty naturally occurring L-amino acids
  MISC_FEATURE (16): Xaa equals any of the twenty naturally occurring L-amino acids
  MISC_FEATURE (18): Xaa equals any of the twenty naturally occurring L-amino acids
  MISC_FEATURE (22): Xaa equals any of the twenty naturally occurring L-amino acids
  MISC_FEATURE (25): Xaa equals any of the twenty naturally occurring L-amino acids
MXNGTRPVAGALSAAXVXVTRXVTXTLASALAPAPFAFFPSFLATFAGFPRQL

SEQ ID NO: 3952 - protein, 88 aa, Homo sapiens
  MISC_FEATURE (78): Xaa equals any of the twenty naturally occurring L-amino acids
PRNYTSCMLVFFNIRYDAAYVYETLFCFLMNLGSWIGRMSSITAEQQTKGTALVLVTCCCAFSPLFFGYWFASYGVLXLKKSGKCIIF

SEQ ID NO: 3953 - protein, 130 aa, Homo sapiens
  MISC_FEATURE (5): Xaa equals any of the twenty naturally occurring L-amino acids
  MISC_FEATURE (71): Xaa equals any of the twenty naturally occurring L-amino acids
  MISC_FEATURE (109): Xaa equals any of the twenty naturally occurring L-amino acids
  MISC_FEATURE (114): Xaa equals any of the twenty naturally occurring L-amino acids
  MISC_FEATURE (116): Xaa equals any of the twenty naturally occurring L-amino acids
  MISC_FEATURE (118): Xaa equals any of the twenty naturally occurring L-amino acids
QPEKXKKKGGRSRGSKLTYACMRRHSSSIVSPKFNSLAVVLQRRDWENPGVTQLNRLAAHPPFASWRNSEXARTDRPSQQLRSLNGEWDAPCSGALSAAGVVVTRSVTXTLASXLXPXPFAFFPSFIATV

SEQ ID NO: 3954 - protein, 73 aa, Homo sapiens
IFLYFTWASLYTAIYTIISYSYMFFVPFVVLFVLLDSYLDGNALSGFGCFSCFSICIKKLVHVNTFHVFSSNV

SEQ ID NO: 3955 - protein, 169 aa, Homo sapiens
  MISC_FEATURE (40): Xaa equals any of the twenty naturally occurring L-amino acids
  MISC_FEATURE (99): Xaa equals any of the twenty naturally occurring L-amino acids
  MISC_FEATURE (100): Xaa equals any of the twenty naturally occurring L-amino acids
  MISC_FEATURE (103): Xaa equals any of the twenty naturally occurring L-amino acids
  MISC_FEATURE (134): Xaa equals any of the twenty naturally occurring L-amino acids
  MISC_FEATURE (143): Xaa equals any of the twenty naturally occurring L-amino acids
  MISC_FEATURE (154): Xaa equals any of the twenty naturally occurring L-amino acids
  MISC_FEATURE (158): Xaa equals any of the twenty naturally occurring L-amino acids
  MISC_FEATURE (167): Xaa equals any of the twenty naturally occurring L-amino acids
  MISC_FEATURE (168): Xaa equals any of the twenty naturally occurring L-amino acids
LLLKKKKKGGRSRGSKLTYACMRRHSSSIVSPKFNSLAVXLQRRDWENPGVTQLNRLAAHPPFASWRNSEEARTDRPSQQLRSLNGEWDAPCSGALSAXXVVXTRSVTATLASAYAVLSFLPSFSHVRRFPASXNRAPLRFDXCYGLDPKLIGXVTMXMPETFACVXXL

SEQ ID NO: 3956 - protein, 118 aa, Homo sapiens
  MISC_FEATURE (9): Xaa equals any of the twenty naturally occurring L-amino acids
  MISC_FEATURE (23): Xaa equals any of the twenty naturally occurring L-amino acids
  MISC_FEATURE (26): Xaa equals any of the twenty naturally occurring L-amino acids
  MISC_FEATURE (36): Xaa equals any of the twenty naturally occurring L-amino acids
  MISC_FEATURE (44): Xaa equals any of the twenty naturally occurring L-amino acids
TRESFPVPXRNSRVDPRVRQIPXILXPGLNKAGKFXSLLTHNEXMVAKVDEVKSTIKFQMKKVLCLAVAVGHVKMTDDELVYNIHLAVNFLVSLLKKNWQNVRALYIKSTMGKPQRLY

SEQ ID NO: 3957 - protein, 87 aa, Homo sapiens
  MISC_FEATURE (47): Xaa equals any of the twenty naturally occurring L-amino acids
  MISC_FEATURE (68): Xaa equals any of the twenty naturally occurring L-amino acids
  MISC_FEATURE (80): Xaa equals any of the twenty naturally occurring L-amino acids
EVAAQCTMNLRQRWRHPAPPLWNRKDDRGGNTGQCGDRAGRVGRPRXSDRYLAGVPAFPIVSRIRACXIMVIAVSCVKLXSAHNSTQ

SEQ ID NO: 3958 - protein, 60 aa, Homo sapiens
  MISC_FEATURE (3): Xaa equals any of the twenty naturally occurring L-amino acids
  MISC_FEATURE (17): Xaa equals any of the twenty naturally occurring L-amino acids
  MISC_FEATURE (22): Xaa equals any of the twenty naturally occurring L-amino acids
  MISC_FEATURE (41): Xaa equals any of the twenty naturally occurring L-amino acids
  MISC_FEATURE (45): Xaa equals any of the twenty naturally occurring L-amino acids
  MISC_FEATURE (50): Xaa equals any of the twenty naturally occurring L-amino acids
  MISC_FEATURE (56): Xaa equals any of the twenty naturally occurring L-amino acids
  MISC_FEATURE (60): Xaa equals any of the twenty naturally occurring L-amino acids
DMXSSFLSLWFKSEILXIFHHXSHQYPSKFLNGNALIFKKXFIQXLKKIXTWLKKXKKKX

SEQ ID NO: 3959 - protein, 104 aa, Homo sapiens
  MISC_FEATURE (23): Xaa equals any of the twenty naturally occurring L-amino acids
  MISC_FEATURE (41): Xaa equals any of the twenty naturally occurring L-amino acids
  MISC_FEATURE (64): Xaa equals any of the twenty naturally occurring L-amino acids
LNKQDLLAEKVLAGKSKIEDYFXEFARYTTPEDATPEPGEXPRVTRAKYFIRDEFLRISTASGXGRHYCYPHFTCAVDTENIRRVFNDCRDIIQRMHLRQYELL

SEQ ID NO: 3960 - protein, 40 aa, Homo sapiens
  MISC_FEATURE (32): Xaa equals any of the twenty naturally occurring L-amino acids
YSFYVCYPSVSSPHFSFLGLKGFFSTLYMCVXIFGFCYIL

SEQ ID NO: 3961 - protein, 39 aa, Homo sapiens
IIASAFKKMCLTKSSQAYIFPIVSILRIYLSSNFEGLSL

SEQ ID NO: 3962 - protein, 70 aa, Homo sapiens
  MISC_FEATURE (33): Xaa equals any of the twenty naturally occurring L-amino acids
  MISC_FEATURE (46): Xaa equals any of the twenty naturally occurring L-amino acids
  MISC_FEATURE (65): Xaa equals any of the twenty naturally occurring L-amino acids
RVFLRRWYLPSQGQVYRDETAIPPSLNEPEANXRCTDMTCVERSLXGLGIRLKEIKNHLQAKIKXYFCLK

SEQ ID NO: 3963 - protein, 33 aa, Homo sapiens
QDAGITSDSMMKNFFFVPSCIQLSQEDSFSAEA

SEQ ID NO: 3964 - protein, 44 aa, Homo sapiens
  MISC_FEATURE (10): Xaa equals any of the twenty naturally occurring L-amino acids
  MISC_FEATURE (33): Xaa equals any of the twenty naturally occurring L-amino acids
  MISC_FEATURE (34): Xaa equals any of the twenty naturally occurring L-amino acids
CGKMTSKLYXTWWSDVELTLFTWSYTECRLCSXXEDMKWVVDTG

SEQ ID NO: 3965 - protein, 38 aa, Homo sapiens
RIRPLPRLSRAGLSKCRLTISTIIRFSHPTRRNMKFQQ

SEQ ID NO: 3966 - protein, 69 aa, Homo sapiens
  MISC_FEATURE (66): Xaa equals any of the twenty naturally occurring L-amino acids
GIYCNFLLYFHLPVDLFEIFTLVKLFFVLVFDADIKIAIILNCQNFQITGKNYLKTNLWVIKGSQXPIH

SEQ ID NO: 3967 - protein, 30 aa, Homo sapiens
NINMPFITYTLIKHWDFTNKIRCSHKKKKK

SEQ ID NO: 3968 - protein, 61 aa, Homo sapiens
  MISC_FEATURE (58): Xaa equals any of the twenty naturally occurring L-amino acids
IFFMITFSFRIVGKIQIMTSEKNLKVTAVPTLLKYGTVSIFKYAGPVIHCQNSFNLLXIQI

SEQ ID NO: 3969 - protein, 70 aa, Homo sapiens
  MISC_FEATURE (12): Xaa equals any of the twenty naturally occurring L-amino acids
  MISC_FEATURE (28): Xaa equals any of the twenty naturally occurring L-amino acids
  MISC_FEATURE (41): Xaa equals any of the twenty naturally occurring L-amino acids
  MISC_FEATURE (56): Xaa equals any of the twenty naturally occurring L-amino acids
YLRYHLICPVNXFSVFRGSWDLKRFGSXSKQIHILGFSSVXSKKRNCHTAKNWLLXWTNQISSQKMTRCL

SEQ ID NO: 3970 - protein, 53 aa, Homo sapiens
  MISC_FEATURE (15): Xaa equals any of the twenty naturally occurring L-amino acids
  MISC_FEATURE (40): Xaa equals any of the twenty naturally occurring L-amino acids
  MISC_FEATURE (47): Xaa equals any of the twenty naturally occurring L-amino acids
  MISC_FEATURE (50): Xaa equals any of the twenty naturally occurring L-amino acids
LQYVYKLNIVEKQSXIFLYVCIYIYNYVLMAILSVFKDVXILTPILXIAXRSN

SEQ ID NO: 3971 - protein, 49 aa, Homo sapiens
  MISC_FEATURE (6): Xaa equals any of the twenty naturally occurring L-amino acids
  MISC_FEATURE (15): Xaa equals any of the twenty naturally occurring L-amino acids
  MISC_FEATURE (19): Xaa equals any of the twenty naturally occurring L-amino acids
  MISC_FEATURE (23): Xaa equals any of the twenty naturally occurring L-amino acids
  MISC_FEATURE (29): Xaa equals any of the twenty naturally occurring L-amino acids
  MISC_FEATURE (30): Xaa equals any of the twenty naturally occurring L-amino acids
  MISC_FEATURE (49): Xaa equals any of the twenty naturally occurring L-amino acids
VVMQAXAPECPTHTXALTXPSEXCVPGDXXKPRKWQMEMIWPAAAVGEX

SEQ ID NO: 3972 - protein, 115 aa, Homo sapiens
  MISC_FEATURE (98): Xaa equals any of the twenty naturally occurring L-amino acids
  MISC_FEATURE (106): Xaa equals any of the twenty naturally occurring L-amino acids
ETIALLVAGLVITVIVIVGAILFVPGEYSLKNATGLGLIVTSTGILILLHYYVFSTAIGLTSFVIAILVIQVIAYILAVVGLSLCIAACIPMHGPLLXSGLRILTXAPITWTRLI

SEQ ID NO: 3973 - protein, 76 aa, Homo sapiens
GPPAHRGQCHPQMTRALHHPTQTMRICNRGGKKNQNFQGPAFFLKSTLKRKFVCIFYLHFIFLYILLGSAIFNDLG

SEQ ID NO: 3974 - protein, 50 aa, Homo sapiens
GQLTKPVTNHISSYPPFPRTFVTQILVILILELVPYGICYLLTSHDILIL

SEQ ID NO: 3975 - protein, 51 aa, Homo sapiens
KSQKTVSQANCLFLSFQIRRHWGGNVLGPKSVARIAKLEKAKAKELATKLG

SEQ ID NO: 3976 - protein, 36 aa, Homo sapiens
  MISC_FEATURE (2): Xaa equals any of the twenty naturally occurring L-amino acids
  MISC_FEATURE (7): Xaa equals any of the twenty naturally occurring L-amino acids
  MISC_FEATURE (10): Xaa equals any of the twenty naturally occurring L-amino acids
GXCSSPXGSXGLQEFIDDDKLTFFQFITVLYSWGGT

SEQ ID NO: 3977 - protein, 111 aa, Homo sapiens
INFHNFFSKKKKKGGRSRGSKLTYACMRRHSSSIVSPKFNSLAVVLQRRDWENPGVTQLNRLAAHPPFASWRNSEEARTDRPSQQLRSLNGEWDAPCSGALSAAVWWLRAA

SEQ ID NO: 3978 - protein, 137 aa, Homo sapiens
  MISC_FEATURE (102): Xaa equals any of the twenty naturally occurring L-amino acids
  MISC_FEATURE (104): Xaa equals any of the twenty naturally occurring L-amino acids
  MISC_FEATURE (108): Xaa equals any of the twenty naturally occurring L-amino acids
  MISC_FEATURE (111): Xaa equals any of the twenty naturally occurring L-amino acids
  MISC_FEATURE (132): Xaa equals any of the twenty naturally occurring L-amino acids
  MISC_FEATURE (133): Xaa equals any of the twenty naturally occurring L-amino acids
LLRMQKKKKKGGRSRGSKLTYACMRRHSSSIVSPKFNSLAVVLQRRDWENPGVTQLNRLAAHPPFASWRNSEEARTDRPSQQLRSLNGEWDAPCSGALSAAXVXVTRXGTXTLARALTPGPFAFFPFLSRHXXPGFS

SEQ ID NO: 3979 - protein, 110 aa, Homo sapiens
  MISC_FEATURE (104): Xaa equals any of the twenty naturally occurring L-amino acids
  MISC_FEATURE (106): Xaa equals any of the twenty naturally occurring L-amino acids
NKHLKKPKKKKKGGRSRGSKLTYACMRRHSSSIVSPKFNSLAVVLQRRDWENPGVTQLNRLAAHPPFASWRNSEEARTDRPSQQLRSLNGEWDAPCSGALSAAXWXLRAA

SEQ ID NO: 3980 - protein, 120 aa, Homo sapiens
  MISC_FEATURE (105): Xaa equals any of the twenty naturally occurring L-amino acids
  MISC_FEATURE (106): Xaa equals any of the twenty naturally occurring L-amino acids
  MISC_FEATURE (118): Xaa equals any of the twenty naturally occurring L-amino acids
NKSTFYKPKKKKKGGRSRGSKLTYACMRRHSSSIVSPKFNSLAVVLQRRDWENPGVTQLNRLAAHPPFASWRNSEEARTDRPSQQLRSLNGEWDAPCSGALSAAXXGGYPQRDPVHLXAP

SEQ ID NO: 3981 - protein, 198 aa, Homo sapiens
  MISC_FEATURE (1): Xaa equals any of the twenty naturally occurring L-amino acids
  MISC_FEATURE (4): Xaa equals any of the twenty naturally occurring L-amino acids
  MISC_FEATURE (6): Xaa equals any of the twenty naturally occurring L-amino acids
  MISC_FEATURE (25): Xaa equals any of the twenty naturally occurring L-amino acids
  MISC_FEATURE (184): Xaa equals any of the twenty naturally occurring L-amino acids
  MISC_FEATURE (187): Xaa equals any of the twenty naturally occurring L-amino acids
  MISC_FEATURE (191): Xaa equals any of the twenty naturally occurring L-amino acids
XWGXGXRYPVRNSRVDPRVRACLFXSYLYIPVSYFALTVLTKKKKKGGRSRGSKLTYACMRRHSSSIVSPKFNSLAVVLQRRDWENPGVTQLNRLAAHPPFASWRNSEEARTDRPSQQLRSLNGEWDAPCSGALSAAGVVVTRSVTATLASALAPAPFAFFPSFLATFAGFPRQALNRGLPLGXRFXALRXLDPKKLD

SEQ ID NO: 3982 - protein, 59 aa, Homo sapiens
  MISC_FEATURE (5): Xaa equals any of the twenty naturally occurring L-amino acids
  MISC_FEATURE (7): Xaa equals any of the twenty naturally occurring L-amino acids
  MISC_FEATURE (19): Xaa equals any of the twenty naturally occurring L-amino acids
  MISC_FEATURE (22): Xaa equals any of the twenty naturally occurring L-amino acids
ILGKXPXRNSRVDPRVRFXLRXGAHHLGSGHLHAQEEQESSTRICINRVPELTEKTIAP

SEQ ID NO: 3983 - protein, 38 aa, Homo sapiens
  MISC_FEATURE (4): Xaa equals any of the twenty naturally occurring L-amino acids
GGSXLCPKCKAHLGRGLRPDMLTSLNCNTGLFFFKTQS

SEQ ID NO: 3984 - protein, 102 aa, Homo sapiens
AQQALVQKRHYLFDVQRNNIAMALEVTYRERLYRVYKEVKNRLDYHISVQNMMRRKEQEHMINWVEKHVVQSISTQQEKETIAKCIADLKLLAKKAQAQPVM

SEQ ID NO: 3985 - protein, 37 aa, Homo sapiens
  MISC_FEATURE (37): Xaa equals any of the twenty naturally occurring L-amino acids
LCRKCRLMYNQNAKDFYMALYEGSLNVNKHVFHFKKX

SEQ ID NO: 3986 - protein, 172 aa, Homo sapiens
  MISC_FEATURE (3): Xaa equals any of the twenty naturally occurring L-amino acids
IWXACRYRSGIPGSTHASVIKHQQLSDLHKQNLEIHRKIKQSEQELAYLERREREGKFKGRGNDRREKLQSFDSPERKRIKYSRETDSDRKLVDKEDIDTSSKGGCVQQATGWRKGTGLGYGHPGLASSEEAEGRMRGPSVGASGRTSKRQSNETYRDAVRRVMFARYKELD

SEQ ID NO: 3987 - protein, 51 aa, Homo sapiens
YPLFTIMLFETKVTMYTILLEEVFDRKSNIMSFINFLGLKKAVIYIYKLCK

SEQ ID NO: 3988 - protein, 63 aa, Homo sapiens
  MISC_FEATURE (23): Xaa equals any of the twenty naturally occurring L-amino acids
  MISC_FEATURE (47): Xaa equals any of the twenty naturally occurring L-amino acids
  MISC_FEATURE (61): Xaa equals any of the twenty naturally occurring L-amino acids
  MISC_FEATURE (63): Xaa equals any of the twenty naturally occurring L-amino acids
KWLCNYILLVSGNQVLFFKSLLXFRIEIFKTWYNFFLKIEEKREDWXVTKIFLNKESVSLXKX

SEQ ID NO: 3989 - protein, 42 aa, Homo sapiens
FLSGYYKQKIFPLLITSKGSWYLSVGMISMNLSYFNGGFFFW

SEQ ID NO: 3990 - protein, 125 aa, Homo sapiens
  MISC_FEATURE (8): Xaa equals any of the twenty naturally occurring L-amino acids
GSCGGLLXTGLLKGTMSGRLWSKAIFAGYKRGLRNQREHTALLKIEGVYARDETEFYLGKRCAYVYKAKNNTVTPGGKPNKTRVIWGKVTRAHGNSGMVRAKFRSNLPAKAIGHRIRVMLYPSRI

SEQ ID NO: 3991 - protein, 91 aa, Homo sapiens
  MISC_FEATURE (14): Xaa equals any of the twenty naturally occurring L-amino acids
AAGAAQPRLQNDAXEFVDLYVPRKCSASNRIIGAKDHASIQMNVAEVDKVTGRFNGQFKTYAICGAIRRMGESDDSILRLAKADGIVSKNF

SEQ ID NO: 3992 - protein, 68 aa, Homo sapiens
  MISC_FEATURE (5): Xaa equals any of the twenty naturally occurring L-amino acids
  MISC_FEATURE (12): Xaa equals any of the twenty naturally occurring L-amino acids
  MISC_FEATURE (13): Xaa equals any of the twenty naturally occurring L-amino acids
  MISC_FEATURE (23): Xaa equals any of the twenty naturally occurring L-amino acids
  MISC_FEATURE (39): Xaa equals any of the twenty naturally occurring L-amino acids
  MISC_FEATURE (64): Xaa equals any of the twenty naturally occurring L-amino acids
RNSRXDPRVRDXXISRGHTPKAXDVLAKEIGLLADEIEXYGKSKAKVRLSVLERLKDQADGKYXLVAG

SEQ ID NO: 3993 - protein, 51 aa, Homo sapiens
GRSVEETLRLVKAFQYVETHGEVCPANWTPDSPTIKPSPAASKEYFQKVNQ

SEQ ID NO: 3994 - protein, 66 aa, Homo sapiens
SLCYNVLKPPYYRNIYYIFSICSFSEGLWISLNCQILAYFCDTPAHFLSLINQGVRCDCHNCYVFQ

SEQ ID NO: 3995 - protein, 51 aa, Homo sapiens
  MISC_FEATURE (20): Xaa equals any of the twenty naturally occurring L-amino acids
  MISC_FEATURE (40): Xaa equals any of the twenty naturally occurring L-amino acids
  MISC_FEATURE (45): Xaa equals any of the twenty naturally occurring L-amino acids
  MISC_FEATURE (47): Xaa equals any of the twenty naturally occurring L-amino acids
  MISC_FEATURE (48): Xaa equals any of the twenty naturally occurring L-amino acids
DGGSGLRRSGSVMRWGKWAXEVWICDEIGKVGSRGLDLWXDGGRXLXXSGS

SEQ ID NO: 3996 - protein, 33 aa, Homo sapiens
  MISC_FEATURE (12): Xaa equals any of the twenty naturally occurring L-amino acids
  MISC_FEATURE (25): Xaa equals any of the twenty naturally occurring L-amino acids
  MISC_FEATURE (26): Xaa equals any of the twenty naturally occurring L-amino acids
  MISC_FEATURE (31): Xaa equals any of the twenty naturally occurring L-amino acids
TSATATALAGGXGTPGRTSPREGFXXLGRTXSW

SEQ ID NO: 3997 - protein, 95 aa, Homo sapiens
  MISC_FEATURE (73): Xaa equals any of the twenty naturally occurring L-amino acids
LPCGLAPRRFFSYGTKILYQNTEALQSKFFSPLQKAMLPPNSFQGKVAFITGGGTGLGKGMTTLLSSLGAQCXIASRKMDVFESYRRTNFFSNWK

SEQ ID NO: 3998 - protein, 137 aa, Homo sapiens
IKTMLEDLGMDDEGDDDPVPLPNVNAAILKKVIQWCTHHKDDPPPPEDDENKEKRTDDIPVWDQEFLKVDQGTLFELILAANYLDIKGLLDVTCKTVANMIKGKTPEEIRKTFNIKNDFTEEEEAQVRKENQWCEEK

SEQ ID NO: 3999 - protein, 170 aa, Homo sapiens
  MISC_FEATURE (3): Xaa equals any of the twenty naturally occurring L-amino acids
  MISC_FEATURE (135): Xaa equals any of the twenty naturally occurring L-amino acids
  MISC_FEATURE (169): Xaa equals any of the twenty naturally occurring L-amino acids
LPXSLAPGPVLFSSMVCLKLPGGSCMTALTVTLMVLSSPLALSGDTRPRFLWQPKRECHFFNGTERVRFLDRYFYNQEESVRFDSDVGEFRAVTELGRPDAEYWNSQKDILEQARAAVDTYCRHNYGVVESFTVXRRVQPKVTVYPSKTQPLQHHKPSGLLCEWFLSKXH

SEQ ID NO: 4000 - protein, 90 aa, Homo sapiens
  MISC_FEATURE (3): Xaa equals any of the twenty naturally occurring L-amino acids
  MISC_FEATURE (8): Xaa equals any of the twenty naturally occurring L-amino acids
  MISC_FEATURE (9): Xaa equals any of the twenty naturally occurring L-amino acids
  MISC_FEATURE (78): Xaa equals any of the twenty naturally occurring L-amino acids
  MISC_FEATURE (88): Xaa equals any of the twenty naturally occurring L-amino acids
GTXKGEGXXGRTGHQASDLRWLKERMYFGVCHIFASFNDTFVHVTDLSGKETICRVTGGMKVKADRDESHHMLLCWLXRMWSNRFKGXWY

SEQ ID NO: 4001 - protein, 95 aa, Homo sapiens
  MISC_FEATURE (13): Xaa equals any of the twenty naturally occurring L-amino acids
  MISC_FEATURE (92): Xaa equals any of the twenty naturally occurring L-amino acids
SIVWQEVFDDKAXLAPGTIVEVWKDSAYPEELSRVTASGFPVILSAPWYLDLISYGQDWRKYYKVEPLDFGGTQKQKQLFIGGEACLWGRIXGCN

SEQ ID NO: 4002 - protein, 168 aa, Homo sapiens
  MISC_FEATURE (1): Xaa equals any of the twenty naturally occurring L-amino acids
  MISC_FEATURE (6): Xaa equals any of the twenty naturally occurring L-amino acids
  MISC_FEATURE (10): Xaa equals any of the twenty naturally occurring L-amino acids
  MISC_FEATURE (27): Xaa equals any of the twenty naturally occurring L-amino acids
  MISC_FEATURE (29): Xaa equals any of the twenty naturally occurring L-amino acids
  MISC_FEATURE (36): Xaa equals any of the twenty naturally occurring L-amino acids
  MISC_FEATURE (145): Xaa equals any of the twenty naturally occurring L-amino acids
  MISC_FEATURE (151): Xaa equals any of the twenty naturally occurring L-amino acids
  MISC_FEATURE (154): Xaa equals any of the twenty naturally occurring L-amino acids
  MISC_FEATURE (164): Xaa equals any of the twenty naturally occurring L-amino acids
  MISC_FEATURE (165): Xaa equals any of the twenty naturally occurring L-amino acids
XIFRFXVTPXGPGPEFPGRPTRPKRLXEXVDAANAXISHIDQTALAVYIAMKTDPRPDAATIKNDMDKQKSTLVDALCRKGCALADHLLHTQAQDGAISTDAEGKEEEGESPLDSLAETFWETTKWTDLFDNKVLTFAYKHALVXKMYGRXLKXATKLVERKPXXRKL

SEQ ID NO: 4003 - protein, 59 aa, Homo sapiens
  MISC_FEATURE (1): Xaa equals any of the twenty naturally occurring L-amino acids
XYQSKNSVFGCINPSLGSRGLVSITLPDSVVHLVLAALFLESSSQSVLAYLLQEWTLIG

SEQ ID NO: 4004 - protein, 64 aa, Homo sapiens
  MISC_FEATURE (53): Xaa equals any of the twenty naturally occurring L-amino acids
ALPDLPRCGNQRELARQKNMKKQSDSVKGKRRDDGLSAAARKQRDSEIMQQKXKKANEKKEEPK

SEQ ID NO: 4005 - protein, 66 aa, Homo sapiens
  MISC_FEATURE (9): Xaa equals any of the twenty naturally occurring L-amino acids
  MISC_FEATURE (11): Xaa equals any of the twenty naturally occurring L-amino acids
  MISC_FEATURE (20): Xaa equals any of the twenty naturally occurring L-amino acids
  MISC_FEATURE (28): Xaa equals any of the twenty naturally occurring L-amino acids
  MISC_FEATURE (55): Xaa equals any of the twenty naturally occurring L-amino acids
LRPGAGPEXKXPGRQKIHIXKKWGFTKXNADEFEDMVAEKRLIPDGCGVKYIPSXGPLDKWRALHS

SEQ ID NO: 4006 - protein, 140 aa, Homo sapiens
  MISC_FEATURE (6): Xaa equals any of the twenty naturally occurring L-amino acids
  MISC_FEATURE (21): Xaa equals any of the twenty naturally occurring L-amino acids
  MISC_FEATURE (24): Xaa equals any of the twenty naturally occurring L-amino acids
  MISC_FEATURE (32): Xaa equals any of the twenty naturally occurring L-amino acids
  MISC_FEATURE (114): Xaa equals any of the twenty naturally occurring L-amino acids
  MISC_FEATURE (128): Xaa equals any of the twenty naturally occurring L-amino acids
  MISC_FEATURE (132): Xaa equals any of the twenty naturally occurring L-amino acids
  MISC_FEATURE (133): Xaa equals any of the twenty naturally occurring L-amino acids
  MISC_FEATURE (137): Xaa equals any of the twenty naturally occurring L-amino acids
WATLRXCLGTFGLIMCLTGDXPGXPGSGAKRXKEAVIVTCGVTTSVKSLTAFACRGHRGNKTGKFYIAFRKAIGCRGLASACSTFVFRGIGTALVFAFKKSSTTVGTDDRHILXWGRIVISGNPVKLXPDVXXKIKXFDF

SEQ ID NO: 4007 - protein, 121 aa, Homo sapiens
  MISC_FEATURE (10): Xaa equals any of the twenty naturally occurring L-amino acids
  MISC_FEATURE (28): Xaa equals any of the twenty naturally occurring L-amino acids
  MISC_FEATURE (49): Xaa equals any of the twenty naturally occurring L-amino acids
  MISC_FEATURE (92): Xaa equals any of the twenty naturally occurring L-amino acids
  MISC_FEATURE (94): Xaa equals any of the twenty naturally occurring L-amino acids
  MISC_FEATURE (102): Xaa equals any of the twenty naturally occurring L-amino acids
  MISC_FEATURE (103): Xaa equals any of the twenty naturally occurring L-amino acids
  MISC_FEATURE (104): Xaa equals any of the twenty naturally occurring L-amino acids
KSGAKGHPVXASLEVTASVFQILDKLLXRESQTHKPQTLSSFYSSSRPXTASQRSPSKHGGPSAPGALQPLTSGSAGPAQPGSVAGAGPGPXDXFTEKNVPXXXGAPDAWVDPGIPDRCLG

SEQ ID NO: 4008 - protein, 68 aa, Homo sapiens
  MISC_FEATURE (15): Xaa equals any of the twenty naturally occurring L-amino acids
  MISC_FEATURE (38): Xaa equals any of the twenty naturally occurring L-amino acids
  MISC_FEATURE (55): Xaa equals any of the twenty naturally occurring L-amino acids
  MISC_FEATURE (60): Xaa equals any of the twenty naturally occurring L-amino acids
  MISC_FEATURE (63): Xaa equals any of the twenty naturally occurring L-amino acids
  MISC_FEATURE (65): Xaa equals any of the twenty naturally occurring L-amino acids
KEMYNLQRNGTLEIXAAFCFIHFKYLCRWTKFNITFLXTINKNIGSTRKKTKNWXYHSDXDRXMXYYA

SEQ ID NO: 4009 - protein, 71 aa, Homo sapiens
  MISC_FEATURE (53): Xaa equals any of the twenty naturally occurring L-amino acids
  MISC_FEATURE (56): Xaa equals any of the twenty naturally occurring L-amino acids
  MISC_FEATURE (57): Xaa equals any of the twenty naturally occurring L-amino acids
  MISC_FEATURE (71): Xaa equals any of the twenty naturally occurring L-amino acids
YGTFPPNSSIKVAFQKKKKRAAALEDPKLTYACMRSHNSSIGAPKIQFTGPAXYNXXDWENPGGTQLKSAX

SEQ ID NO: 4010 - protein, 71 aa, Homo sapiens
  MISC_FEATURE (62): Xaa equals any of the twenty naturally occurring L-amino acids
ICDKIQKKKKKKGGRSRGSKLTYACMRRHSSSIVAPKFNSLARVYNRRDWENPGVTQLNRLXSTFPFRSWA

SEQ ID NO: 4011 - protein, 128 aa, Homo sapiens
  MISC_FEATURE (91): Xaa equals any of the twenty naturally occurring L-amino acids
  MISC_FEATURE (117): Xaa equals any of the twenty naturally occurring L-amino acids
  MISC_FEATURE (120): Xaa equals any of the twenty naturally occurring L-amino acids
  MISC_FEATURE (123): Xaa equals any of the twenty naturally occurring L-amino acids
NKPFFSLISFFFQFFFSAKNIFRIRFHDPSPAQSHTLQANDVFHKQQWFNCIRAAIAPFQSAGSPPELQGLPELHEECEGNHPSARKLTAXRRASTVSSVTQVEVDENAYRCGSGMXKAXDSXNLKTT

SEQ ID NO: 4012 - protein, 71 aa, Homo sapiens
  MISC_FEATURE (4): Xaa equals any of the twenty naturally occurring L-amino acids
  MISC_FEATURE (9): Xaa equals any of the twenty naturally occurring L-amino acids
  MISC_FEATURE (14): Xaa equals any of the twenty naturally occurring L-amino acids
  MISC_FEATURE (26): Xaa equals any of the twenty naturally occurring L-amino acids
  MISC_FEATURE (41): Xaa equals any of the twenty naturally occurring L-amino acids
  MISC_FEATURE (64): Xaa equals any of the twenty naturally occurring L-amino acids
  MISC_FEATURE (66): Xaa equals any of the twenty naturally occurring L-amino acids
  MISC_FEATURE (69): Xaa equals any of the twenty naturally occurring L-amino acids
QDRXGIGEXEEGAXGRGAGRKDITSXLRAPADPLEHQGQPXPAPRPGPPAGTPPPTARHCQEHXRXQRXTS

SEQ ID NO: 4013 - protein, 140 aa, Homo sapiens
  MISC_FEATURE (3): Xaa equals any of the twenty naturally occurring L-amino acids
  MISC_FEATURE (20): Xaa equals any of the twenty naturally occurring L-amino acids
  MISC_FEATURE (22): Xaa equals any of the twenty naturally occurring L-amino acids
  MISC_FEATURE (27): Xaa equals any of the twenty naturally occurring L-amino acids
  MISC_FEATURE (34): Xaa equals any of the twenty naturally occurring L-amino acids
  MISC_FEATURE (97): Xaa equals any of the twenty naturally occurring L-amino acids
  MISC_FEATURE (105): Xaa equals any of the twenty naturally occurring L-amino acids
  MISC_FEATURE (107): Xaa equals any of the twenty naturally occurring L-amino acids
ITXGKNSLQVPGPEFPGRPXRXELSNXNQCETAXSQHLHLVCKKTSQNLHLVCKKTHTQEKPYKCSDCEKGLPSSSHLRECVRIYGGERPYTHKEYXETFSQSTXLXDTCKLKMEKNSMNVKHVGNPSLSRISYSTFKNS

SEQ ID NO: 4014 - protein, 52 aa, Homo sapiens
YSKGTTIDITMMLLLSDNPESYRTDFDSINHSPIIGKCHKALRKYRYIPTNI

SEQ ID NO: 4015 - protein, 87 aa, Homo sapiens
  MISC_FEATURE (3): Xaa equals any of the twenty naturally occurring L-amino acids
  MISC_FEATURE (12): Xaa equals any of the twenty naturally occurring L-amino acids
  MISC_FEATURE (16): Xaa equals any of the twenty naturally occurring L-amino acids
  MISC_FEATURE (17): Xaa equals any of the twenty naturally occurring L-amino acids
  MISC_FEATURE (26): Xaa equals any of the twenty naturally occurring L-amino acids
  MISC_FEATURE (29): Xaa equals any of the twenty naturally occurring L-amino acids
  MISC_FEATURE (43): Xaa equals any of the twenty naturally occurring L-amino acids
  MISC_FEATURE (52): Xaa equals any of the twenty naturally occurring L-amino acids
  MISC_FEATURE (55): Xaa equals any of the twenty naturally occurring L-amino acids
  MISC_FEATURE (57): Xaa equals any of the twenty naturally occurring L-amino acids
  MISC_FEATURE (75): Xaa equals any of the twenty naturally occurring L-amino acids
  MISC_FEATURE (77): Xaa equals any of the twenty naturally occurring L-amino acids
  MISC_FEATURE (78): Xaa equals any of the twenty naturally occurring L-amino acids
  MISC_FEATURE (82): Xaa equals any of the twenty naturally occurring L-amino acids
  MISC_FEATURE (85): Xaa equals any of the twenty naturally occurring L-amino acids
  MISC_FEATURE (86): Xaa equals any of the twenty naturally occurring L-amino acids
DRXGIPGSTHAXDHAXXSNPPHLHAXQGXKVKIKRTTMRARLXGERRGDTTXPQXCXLIGPPGPSEPSPSDHLEXRXXSKRXEKXXP

SEQ ID NO: 4016 - protein, 139 aa, Homo sapiens
  MISC_FEATURE (3): Xaa equals any of the twenty naturally occurring L-amino acids
PTXPMGRVRTKTVKKAARVIIEKYYTRLGNDFHTNKRVCEEIAIIPSKKLRNKIAGYVTHLMKRIQRGPVRGISIKLQEEERERRDNYVPEVSALDQEIIEVDPDTKEMLKLLDFGSLSNLQVTQPTVGMNFKTPRGPV

SEQ ID NO: 4017 - protein, 86 aa, Homo sapiens
  MISC_FEATURE (81): Xaa equals any of the twenty naturally occurring L-amino acids
  MISC_FEATURE (85): Xaa equals any of the twenty naturally occurring L-amino acids
  MISC_FEATURE (86): Xaa equals any of the twenty naturally occurring L-amino acids
TLAFFLIPCIGSPACPTMSDAAVDTSSEITTKDLKEKKEVVEEAENGRDAPANGNANEENGEQEADNEVDEEEEEGGEEEXDLPXX

SEQ ID NO: 4018 - protein, 231 aa, Homo sapiens
  MISC_FEATURE (1): Xaa equals any of the twenty naturally occurring L-amino acids
  MISC_FEATURE (2): Xaa equals any of the twenty naturally occurring L-amino acids
  MISC_FEATURE (4): Xaa equals any of the twenty naturally occurring L-amino acids
  MISC_FEATURE (13): Xaa equals any of the twenty naturally occurring L-amino acids
  MISC_FEATURE (174): Xaa equals any of the twenty naturally occurring L-amino acids
  MISC_FEATURE (194): Xaa equals any of the twenty naturally occurring L-amino acids
  MISC_FEATURE (203): Xaa equals any of the twenty naturally occurring L-amino acids
  MISC_FEATURE (216): Xaa equals any of the twenty naturally occurring L-amino acids
  MISC_FEATURE (222): Xaa equals any of the twenty naturally occurring L-amino acids
  MISC_FEATURE (224): Xaa equals any of the twenty naturally occurring L-amino acids
  MISC_FEATURE (225): Xaa equals any of the twenty naturally occurring L-amino acids
XXFXKTLTGKTVXLDVEPSDTIENVKAKIQDKEGIPPDQQRLIFAGKQLEDGRTLSDYNIQKESTLHLVLRLRGGMQIFVKTLTGKTITLEVEPSDTIENVKAKIQDKEGIPPDQQRLIFAGKQLEDGRTLSDYNIQKESTLHLVLRLRGGMQIFVKTLTGKTITLEVEPSDTXENVKAKIQDKESIPPDQQKXIFAGKQLEXGRTLSDYNIQERXPPCTWXSXXKGGDAK

SEQ ID NO: 4019 - protein, 78 aa, Homo sapiens
  MISC_FEATURE (5): Xaa equals any of the twenty naturally occurring L-amino acids
  MISC_FEATURE (17): Xaa equals any of the twenty naturally occurring L-amino acids
VGHLXNGPYAQSHRNWXPSLDSDHARPGPLGLPPQDSLDPTLSTDFCDHSPLRAGGLSLHQLSRLLSLRLWLMRNTQA

SEQ ID NO: 4020 - protein, 111 aa, Homo sapiens
  MISC_FEATURE (2): Xaa equals any of the twenty naturally occurring L-amino acids
  MISC_FEATURE (4): Xaa equals any of the twenty naturally occurring L-amino acids
  MISC_FEATURE (20): Xaa equals any of the twenty naturally occurring L-amino acids
AXRXGPEFPGRPTRPVAATXPLRTKKVGIVGKYGTRYGASLRKMVKKIEISQHAKYTCSFCGKTKMKRRAVGIWHCGSCMKTVAGGAWTYNTTSAVTVKSAIRRLKELKDQ

SEQ ID NO: 4021 - protein, 68 aa, Homo sapiens
PAKTYRFFSLWQRGRPDRSSAPIGNSGLPCPDLEPLGGLQTKQRLPCRKRSCQQAPQICHAGWWKSLW

SEQ ID NO: 4022 - protein, 181 aa, Homo sapiens
  MISC_FEATURE (2): Xaa equals any of the twenty naturally occurring L-amino acids
  MISC_FEATURE (4): Xaa equals any of the twenty naturally occurring L-amino acids
  MISC_FEATURE (5): Xaa equals any of the twenty naturally occurring L-amino acids
  MISC_FEATURE (181): Xaa equals any of the twenty naturally occurring L-amino acids
EXLXXPGDKVPPIKPNAGEESVMNLDKLRFADGSIRTSELRLSMQKSMQNHAAVFRVGSVLQEGCGKISKLYGDLKHLKTFDRGMVWNTDLVETLELQNLMLCALQTIYGAEARKESRGAHAREDYKVRIDEYDYSKPIQGQQKKPFEEHWRKHTLSFVDVGTGKVTLEYRPVSDKTLNRX

SEQ ID NO: 4023 - protein, 147 aa, Homo sapiens
  MISC_FEATURE (5): Xaa equals any of the twenty naturally occurring L-amino acids
  MISC_FEATURE (6): Xaa equals any of the twenty naturally occurring L-amino acids
  MISC_FEATURE (114): Xaa equals any of the twenty naturally occurring L-amino acids
  MISC_FEATURE (144): Xaa equals any of the twenty naturally occurring L-amino acids
ARIQXXFSIKKALDAKIARYKAPFHQLRIQYGTSKGKNYTEEEDRFLICMLHKMGFDRENVYEELRQCVRNAPQFRFDWFIKSRTAMEFQRRCNTLISLIEKENMEIEERERAXKKKRATKTPMSQKRKAESATESSGKKDVKXVKS

SEQ ID NO: 4024 - protein, 215 aa, Homo sapiens
  MISC_FEATURE (4): Xaa equals any of the twenty naturally occurring L-amino acids
  MISC_FEATURE (5): Xaa equals any of the twenty naturally occurring L-amino acids
  MISC_FEATURE (199): Xaa equals any of the twenty naturally occurring L-amino acids
QEYXXLQKDNPAEYASLMEILYTLKEKGSSNHNLLAAPRAALTRLNQQAHQLAFDSVFLRIKQQLLLISKMDSWNTAGIGETLTDELPAFSLTPLEYISNIGQYIMSLPLNLEPFVTQEDSALELALHAGKLPFPPEQGDELPELDNMADNWLGSIARATMQTYCDAILQIPELSPHSAKQLATDIDYLINVMDALGLXPVPHPPAHRDATEDQA

SEQ ID NO: 4025 - protein, 152 aa, Homo sapiens
  MISC_FEATURE (133): Xaa equals any of the twenty naturally occurring L-amino acids
  MISC_FEATURE (139): Xaa equals any of the twenty naturally occurring L-amino acids
  MISC_FEATURE (145): Xaa equals any of the twenty naturally occurring L-amino acids
  MISC_FEATURE (149): Xaa equals any of the twenty naturally occurring L-amino acids
  MISC_FEATURE (152): Xaa equals any of the twenty naturally occurring L-amino acids
MAGGPPPRPHPSRGPRRPTQWPTRRMSALCPKPGSRCNSSWMVAQPVRAGQGLCSTWRGPPIPGCRTSGGRSSSWRESPAVPSGCWEGALLHGRPVARREAWRPCPPTALAGCRPHLKCQHLDFCTFFSLGPXCPTQAXHWAKGXETRXEPX

SEQ ID NO: 4026 - protein, 213 aa, Homo sapiens
  MISC_FEATURE (2): Xaa equals any of the twenty naturally occurring L-amino acids
  MISC_FEATURE (191): Xaa equals any of the twenty naturally occurring L-amino acids
  MISC_FEATURE (203): Xaa equals any of the twenty naturally occurring L-amino acids
GXFSTFLRTSETGIVDQVMVTLNQEGYKFCKIRVRSVRIPQIGDKFASRHGQKGTCGIQYRQEDMPFTCEGITPDIIINPHAIPSRMTIGHLIECLQGKVSANKGEIGDATPFNDAVNVQKISNLLSDYGYHLRGNEVLYNGFTGRKITSQIFIGPTYYQRLKHMVDDKIHSRARGPIQILNRQPWRVDLXMVACVLEKLDRXCQIAHGAPQF

SEQ ID NO: 4027 - protein, 183 aa, Homo sapiens
IHAMAMRKVREVRAQLKDIMVQQRMSLASCGTDWDIVRKCICAAYFHQAAKLKGIGEYVNIRTGMPCHLHPTSSLFGMGYTPDYIVYHELVMTTKEYMQCVTAVDGEWLAELGPMFYSVKQAGKSRQENRRRAKEEASAMEEEMALAEEQLRARRQEQEKRSPLAVSGLRRSTLQAGKSKGSP

SEQ ID NO: 4028 - protein, 71 aa, Homo sapiens
  MISC_FEATURE (3): Xaa equals any of the twenty naturally occurring L-amino acids
  MISC_FEATURE (4): Xaa equals any of the twenty naturally occurring L-amino acids
  MISC_FEATURE (11): Xaa equals any of the twenty naturally occurring L-amino acids
  MISC_FEATURE (14): Xaa equals any of the twenty naturally occurring L-amino acids
  MISC_FEATURE (16): Xaa equals any of the twenty naturally occurring L-amino acids
  MISC_FEATURE (22): Xaa equals any of the twenty naturally occurring L-amino acids
  MISC_FEATURE (24): Xaa equals any of the twenty naturally occurring L-amino acids
  MISC_FEATURE (28): Xaa equals any of the twenty naturally occurring L-amino acids
  MISC_FEATURE (29): Xaa equals any of the twenty naturally occurring L-amino acids
  MISC_FEATURE (31): Xaa equals any of the twenty naturally occurring L-amino acids
  MISC_FEATURE (44): Xaa equals any of the twenty naturally occurring L-amino acids
  MISC_FEATURE (46): Xaa equals any of the twenty naturally occurring L-amino acids
  MISC_FEATURE (54): Xaa equals any of the twenty naturally occurring L-amino acids
  MISC_FEATURE (60): Xaa equals any of the twenty naturally occurring L-amino acids
  MISC_FEATURE (62): Xaa equals any of the twenty naturally occurring L-amino acids
PPXXGSVHHQXNSXGXSNVSLXTXEPRXXKXLSITRLNKHVHNXTXKKNAVSIXHFHGTXEXTSCLFKILY

SEQ ID NO: 4029 - protein, 83 aa, Homo sapiens
  MISC_FEATURE (34): Xaa equals any of the twenty naturally occurring L-amino acids
LVPGGGASEMAVAHALTEKSKAMTGVEQWPYRAXAQALEVIPRTLIQNCGASTIRLLTSLRAKHTQENCETWGVNGETGLWRT

SEQ ID NO: 4030 - protein, 78 aa, Homo sapiens
  MISC_FEATURE (76): Xaa equals any of the twenty naturally occurring L-amino acids
EAHPCFFPEVFSLCCIFLLIVCFRFTHNSLDSCRFPTAPMHHLSSLCFLHCQHDTHNTLILLPMSESGEAESRPSXRH

SEQ ID NO: 4031 - protein, 63 aa, Homo sapiens
  MISC_FEATURE (6): Xaa equals any of the twenty naturally occurring L-amino acids
  MISC_FEATURE (18): Xaa equals any of the twenty naturally occurring L-amino acids
  MISC_FEATURE (29): Xaa equals any of the twenty naturally occurring L-amino acids
  MISC_FEATURE (32): Xaa equals any of the twenty naturally occurring L-amino acids
  MISC_FEATURE (36): Xaa equals any of the twenty naturally occurring L-amino acids
  MISC_FEATURE (45): Xaa equals any of the twenty naturally occurring L-amino acids
  MISC_FEATURE (49): Xaa equals any of the twenty naturally occurring L-amino acids
  MISC_FEATURE (50): Xaa equals any of the twenty naturally occurring L-amino acids
  MISC_FEATURE (59): Xaa equals any of the twenty naturally occurring L-amino acids
TKVVNXVVQIFSILLFFXLLLDLSDSEMXMKXSILXNLPISPCNXVNFXXMYVYIFRSXVINK

SEQ ID NO: 4032 - protein, 45 aa, Homo sapiens
PHFSTESSRREGWLPKSITLTKPNNRHQQCCHSVMQKLICEILLL

SEQ ID NO: 4033 - protein, 136 aa, Homo sapiens
KILLANFLAQTEALMRGKSTEEARKELQAAGKSPEDLERLLPHKVFEGNRPTNSIVFTKLTPFMLGALVAMYEHKIFVQGIIWDINSFDQWGVELGKQLAKKIEPELDGSAQVTSHDASTNGLINFIKQQREARVQ

SEQ ID NO: 4034 - protein, 89 aa, Homo sapiens
  MISC_FEATURE (58): Xaa equals any of the twenty naturally occurring L-amino acids
GNETSVFGPTGNKTLGLAIKRFYYPFKPHLPTKEFLLSLLQIFDAVIVHKQFYLFYNXEYWFLPMKFPFIKITYEEIPLPIRNKTLSGL

SEQ ID NO: 4035 - protein, 140 aa, Homo sapiens
  MISC_FEATURE (5): Xaa equals any of the twenty naturally occurring L-amino acids
  MISC_FEATURE (9): Xaa equals any of the twenty naturally occurring L-amino acids
  MISC_FEATURE (88): Xaa equals any of the twenty naturally occurring L-amino acids
  MISC_FEATURE (95): Xaa equals any of the twenty naturally occurring L-amino acids
  MISC_FEATURE (120): Xaa equals any of the twenty naturally occurring L-amino acids
  MISC_FEATURE (127): Xaa equals any of the twenty naturally occurring L-amino acids
RPLGXFSQXKAMFSSSAKIVKPNGEKPDEFESGISQALLELEMNSDLKAQLRELNITAAKEIEVGGGRKAIIIFVPVPQLKSFQKIQXRLVRELXKKFSVKHVVFIAQRRILLSQLEKAXQKISKSXQEPYSDRLARCHP

SEQ ID NO: 4036 - protein, 52 aa, Homo sapiens
  MISC_FEATURE (4): Xaa equals any of the twenty naturally occurring L-amino acids
  MISC_FEATURE (32): Xaa equals any of the twenty naturally occurring L-amino acids
  MISC_FEATURE (33): Xaa equals any of the twenty naturally occurring L-amino acids
  MISC_FEATURE (34): Xaa equals any of the twenty naturally occurring L-amino acids
  MISC_FEATURE (35): Xaa equals any of the twenty naturally occurring L-amino acids
  MISC_FEATURE (38): Xaa equals any of the twenty naturally occurring L-amino acids
QEPXATPNLVLVAEHPVRQEQAAQLEQTLGGXXXXVRXEAAQCSKWFLGGRS

SEQ ID NO: 4037 - protein, 161 aa, Homo sapiens
LRLHDPLGPASPAAVMNIRNARPEDLMNMQHCNLLCLPENYQMKYYFYHGLSWPQLSYIAEDENGKIVGYVLAKMEEDPDDVPHGHITSLAVKRSHRRLGLAQKLMDQASRAMIENFNAKYVSLHVRKSNRAACTSIPTPSTFRSVKWSPNTMQMGRTPMP

SEQ ID NO: 4038 - protein, 93 aa, Homo sapiens
  MISC_FEATURE (45): Xaa equals any of the twenty naturally occurring L-amino acids
  MISC_FEATURE (50): Xaa equals any of the twenty naturally occurring L-amino acids
  MISC_FEATURE (51): Xaa equals any of the twenty naturally occurring L-amino acids
  MISC_FEATURE (53): Xaa equals any of the twenty naturally occurring L-amino acids
  MISC_FEATURE (57): Xaa equals any of the twenty naturally occurring L-amino acids
  MISC_FEATURE (66): Xaa equals any of the twenty naturally occurring L-amino acids
  MISC_FEATURE (67): Xaa equals any of the twenty naturally occurring L-amino acids
KKMARTKQTARKSTGGKAPRKQLATKAARKSAPSTGGVKKPHRFXAREPXXLXRDSXVSRKSTRAXXIRKLGPFQEGLVEGENRRQGFSKTRP

SEQ ID NO: 4039 - protein, 158 aa, Homo sapiens
  MISC_FEATURE (2): Xaa equals any of the twenty naturally occurring L-amino acids
  MISC_FEATURE (143): Xaa equals any of the twenty naturally occurring L-amino acids
  MISC_FEATURE (145): Xaa equals any of the twenty naturally occurring L-amino acids
GXPEMPASQSKACETQPKQTSVASANQVSRTESPQGLPTVQRENAKKVLNPPAPAGDHARLDGLSKMDTEKAASANHVKPKPELTSIQGQPASTSQPLLKAHSEVFTKPSGQQTLSPDRQVPRPTALPRRQPTVHFSDVSSDXYXDRACDSNLMDFNF

SEQ ID NO: 4040 - protein, 145 aa, Homo sapiens
  MISC_FEATURE (6): Xaa equals any of the twenty naturally occurring L-amino acids
  MISC_FEATURE (7): Xaa equals any of the twenty naturally occurring L-amino acids
  MISC_FEATURE (9): Xaa equals any of the twenty naturally occurring L-amino acids
  MISC_FEATURE (91): Xaa equals any of the twenty naturally occurring L-amino acids
  MISC_FEATURE (101): Xaa equals any of the twenty naturally occurring L-amino acids
  MISC_FEATURE (124): Xaa equals any of the twenty naturally occurring L-amino acids
  MISC_FEATURE (134): Xaa equals any of the twenty naturally occurring L-amino acids
  MISC_FEATURE (136): Xaa equals any of the twenty naturally occurring L-amino acids
  MISC_FEATURE (137): Xaa equals any of the twenty naturally occurring L-amino acids
SPNAQXXHXMSPTPEDQVSAAPLLARALHWGAKGWRPCRWPCPPWASRPLRGWPVLPITSLGQSHHLLSIKLPQRLRPPGLHQPKPPGLPXALGLIPINGXNLNLRSLGAWRGFWVLAQLFPSXSLGGKVPEAXGXXKAASPVDP

SEQ ID NO: 4041 - protein, 59 aa, Homo sapiens
  MISC_FEATURE (34): Xaa equals any of the twenty naturally occurring L-amino acids
  MISC_FEATURE (37): Xaa equals any of the twenty naturally occurring L-amino acids
RALPLWPLLQTPALTHTPLGLHSFALKDLSQASXKKXEILVELGGGNEHELAFHLGYVH

SEQ ID NO: 4042 - protein, 134 aa, Homo sapiens
TCMCQWLWSRLGWGSSRVSGRGHCSASAPLRTRAGSWGHLVPWSLDKQCFGGSGQLCGVCVLTMHWALVCVGLHTEGPWGRPSGLPQPVGWTGARQASELPPPGASRPPVPPPVWQVASLRVMGPNPFSSVEKG

SEQ ID NO: 4043 - protein, 109 aa, Homo sapiens
  MISC_FEATURE (16): Xaa equals any of the twenty naturally occurring L-amino acids
  MISC_FEATURE (25): Xaa equals any of the twenty naturally occurring L-amino acids
  MISC_FEATURE (31): Xaa equals any of the twenty naturally occurring L-amino acids
  MISC_FEATURE (47): Xaa equals any of the twenty naturally occurring L-amino acids
  MISC_FEATURE (51): Xaa equals any of the twenty naturally occurring L-amino acids
  MISC_FEATURE (71): Xaa equals any of the twenty naturally occurring L-amino acids
  MISC_FEATURE (75): Xaa equals any of the twenty naturally occurring L-amino acids
  MISC_FEATURE (85): Xaa equals any of the twenty naturally occurring L-amino acids
  MISC_FEATURE (97): Xaa equals any of the twenty naturally occurring L-amino acids
  MISC_FEATURE (108): Xaa equals any of the twenty naturally occurring L-amino acids
PLGPGLTLTHNRTMTXWGGIPSSLXGPKEWXSRTVGDQTLPRNSSKXGTAXGDCLQKPELQRTTPPIPCAXLSHXGTGGAGLEVXVVSWLQGSTRPXLIRIGASLLSXA

SEQ ID NO: 4044 - protein, 168 aa, Homo sapiens
NREKMTQIMFETFNTPAMYVAIQAVLSLYASGRTTGIVMDSGDGVTHTVPIYEGYALPHAILRLDLAGRDLTDYLMKILTERGYSFTTTAEREIVRDIKEKLCYVALDFEQEMATAASSSSLEKSYELPDGQVITIGNERFRCPEALSSLPFWVWNLAASTRPPSTPS

SEQ ID NO: 4045 - protein, 175 aa, Homo sapiens
  MISC_FEATURE (4): Xaa equals any of the twenty naturally occurring L-amino acids
  MISC_FEATURE (34): Xaa equals any of the twenty naturally occurring L-amino acids
  MISC_FEATURE (90): Xaa equals any of the twenty naturally occurring L-amino acids
  MISC_FEATURE (106): Xaa equals any of the twenty naturally occurring L-amino acids
  MISC_FEATURE (166): Xaa equals any of the twenty naturally occurring L-amino acids
GPAXLPDQKQLRYTEELLRHVAPGLHLELRGPQXWARRMGKCKVYWEVGGPPGSASPSTPACLLPRNCDTPIFDFRVFFQGQVRPLAWGXGFKGSLGKHLPCQVLXKKSPSSELVEFRHGAPWLPTLYHLPGLRAGPVSLGGPRRRPGPGEAGTLVVPMHLEGTHXKVGFLDRQA

SEQ ID NO: 4046 - protein, 128 aa, Homo sapiens
  MISC_FEATURE (1): Xaa equals any of the twenty naturally occurring L-amino acids
  MISC_FEATURE (2): Xaa equals any of the twenty naturally occurring L-amino acids
  MISC_FEATURE (3): Xaa equals any of the twenty naturally occurring L-amino acids
  MISC_FEATURE (7): Xaa equals any of the twenty naturally occurring L-amino acids
  MISC_FEATURE (8): Xaa equals any of the twenty naturally occurring L-amino acids
  MISC_FEATURE (49): Xaa equals any of the twenty naturally occurring L-amino acids
  MISC_FEATURE (50): Xaa equals any of the twenty naturally occurring L-amino acids
  MISC_FEATURE (54): Xaa equals any of the twenty naturally occurring L-amino acids
  MISC_FEATURE (80): Xaa equals any of the twenty naturally occurring L-amino acids
  MISC_FEATURE (95): Xaa equals any of the twenty naturally occurring L-amino acids
  MISC_FEATURE (103): Xaa equals any of the twenty naturally occurring L-amino acids
  MISC_FEATURE (104): Xaa equals any of the twenty naturally occurring L-amino acids
  MISC_FEATURE (105): Xaa equals any of the twenty naturally occurring L-amino acids
  MISC_FEATURE (114): Xaa equals any of the twenty naturally occurring L-amino acids
  MISC_FEATURE (117): Xaa equals any of the twenty naturally occurring L-amino acids
  MISC_FEATURE (121): Xaa equals any of the twenty naturally occurring L-amino acids
  MISC_FEATURE (124): Xaa equals any of the twenty naturally occurring L-amino acids
XXXWTVXXNTFNSIMKCDVDIRKDLYANTVLSGGTTMYPGIADRMHKGXXLALXPSTIERIKNNWFLLERQGTPGVGIGXASNPLGPSLCPTLSXQEWWGIKXXXREVIEPKVXGPXPIRXHRXKWLS

SEQ ID NO: 4047 - protein, 110 aa, Homo sapiens
  MISC_FEATURE (41): Xaa equals any of the twenty naturally occurring L-amino acids
  MISC_FEATURE (73): Xaa equals any of the twenty naturally occurring L-amino acids
  MISC_FEATURE (91): Xaa equals any of the twenty naturally occurring L-amino acids
  MISC_FEATURE (100): Xaa equals any of the twenty naturally occurring L-amino acids
EAGRSRSLPPRAFTRAMFVYCGKKAQLNIGNVLPVGTMPEXTIVCCLEEKPGDRGKLARASGNYATVISHNPXTKKTLVKLPSGSKKVISXPTELWLVWXLEVAELTNPS

SEQ ID NO: 4048 - protein, 64 aa, Homo sapiens
MKDCWFRICRKLLSKRRVGEASWFEGLEGHLLYSQLRGLFLLIFRRMPPEPGVTVGLCQRHVRT

SEQ ID NO: 4049 - protein, 160 aa, Homo sapiens
  MISC_FEATURE (18): Xaa equals any of the twenty naturally occurring L-amino acids
  MISC_FEATURE (37): Xaa equals any of the twenty naturally occurring L-amino acids
  MISC_FEATURE (91): Xaa equals any of the twenty naturally occurring L-amino acids
  MISC_FEATURE (101): Xaa equals any of the twenty naturally occurring L-amino acids
  MISC_FEATURE (130): Xaa equals any of the twenty naturally occurring L-amino acids
  MISC_FEATURE (137): Xaa equals any of the twenty naturally occurring L-amino acids
  MISC_FEATURE (156): Xaa equals any of the twenty naturally occurring L-amino acids
PACRYRSGIPGSTHAFGXIKFNVWDTAGQEKFGALRXGYYIQAQCAIIMFDVTSRVTYKNVPNWHRDLVRVCENIPIVLCGNKVDIKDRKXKAKSIVFHRXKNLQYYDISAKSNYNFEKPFLWLARKLIXDPNLEFXAMPALAPPEVVMDPALQHXMSTT

SEQ ID NO: 4050 - protein, 59 aa, Homo sapiens
  MISC_FEATURE (20): Xaa equals any of the twenty naturally occurring L-amino acids
  MISC_FEATURE (21): Xaa equals any of the twenty naturally occurring L-amino acids
  MISC_FEATURE (29): Xaa equals any of the twenty naturally occurring L-amino acids
  MISC_FEATURE (32): Xaa equals any of the twenty naturally occurring L-amino acids
  MISC_FEATURE (41): Xaa equals any of the twenty naturally occurring L-amino acids
  MISC_FEATURE (44): Xaa equals any of the twenty naturally occurring L-amino acids
  MISC_FEATURE (58): Xaa equals any of the twenty naturally occurring L-amino acids
SGIHSAEECLPLRGLQPLWXXSHGWGLPXHYXHDWRARAAXPWXSLLSGDLTITSLGXH

SEQ ID NO: 4051 - protein, 100 aa, Homo sapiens
  MISC_FEATURE (2): Xaa equals any of the twenty naturally occurring L-amino acids
  MISC_FEATURE (31): Xaa equals any of the twenty naturally occurring L-amino acids
  MISC_FEATURE (37): Xaa equals any of the twenty naturally occurring L-amino acids
  MISC_FEATURE (50): Xaa equals any of the twenty naturally occurring L-amino acids
  MISC_FEATURE (53): Xaa equals any of the twenty naturally occurring L-amino acids
  MISC_FEATURE (56): Xaa equals any of the twenty naturally occurring L-amino acids
  MISC_FEATURE (60): Xaa equals any of the twenty naturally occurring L-amino acids
  MISC_FEATURE (65): Xaa equals any of the twenty naturally occurring L-amino acids
  MISC_FEATURE (84): Xaa equals any of the twenty naturally occurring L-amino acids
  MISC_FEATURE (93): Xaa equals any of the twenty naturally occurring L-amino acids
  MISC_FEATURE (96): Xaa equals any of the twenty naturally occurring L-amino acids
RXEMTKGTSSFGKRRNKTHTLCRRCGSKAYXLQKSTXGKCGYPAKRKRKXNWXARXKDEXTTGTXRMRHLKIVYRRFRHGFREXTTPKPKRAXVAXSSSS

SEQ ID NO: 4052 - protein, 102 aa, Homo sapiens
GRRSEMTKGTSSFGKRRNKTHTLCRRCGSKAYHLQKSTCGKCGYPAKRKRKYNWSAKAKRRNTTGTGRMRHLKIVYRRFRHGFREGTTPKPKRAAVAASSSS

SEQ ID NO: 4053 - protein, 87 aa, Homo sapiens
  MISC_FEATURE (50): Xaa equals any of the twenty naturally occurring L-amino acids
AAQTEAQAQGRNLEQGHFGHSRTGERQLYFSLGQLQRVGQALMGSDCQSXAVGPRQRKAGRRGARTFSPHCPSPFLGSTASSYPHFL

SEQ ID NO: 4054 - protein, 107 aa, Homo sapiens
ELLSCFLCFKGCTKMFRDNSAMRKHLHTHGPRVHVCAECGKAFVESSKLKRHQLVHTGEKPFQCTFEGCGKRFSLDFNLRTHVRIHTGDRPYVCPFDGCNKKFAQVN

SEQ ID NO: 4055 - protein, 207 aa, Homo sapiens
VELCDAAGRPDQEVAQEAWQNHKRRNDSVIVDTFHGLFKSTLVCPDCGNVSVTFDPFCYLSVPLPISHKRVLEVFFIPMDPRRKPEQHRLVVPKKGKISDLCVALSKHTGISPERMMVADVFSHRFYKLYQLEEPLSSILDRDDIFVYEVSGRIEAIEGSREDIVVPVYLRERTPARDYHNSYYGLMLFGHPLLVSVPRDRLPGRPV

SEQ ID NO: 4056 - protein, 88 aa, Homo sapiens
  MISC_FEATURE (8): Xaa equals any of the twenty naturally occurring L-amino acids
  MISC_FEATURE (36): Xaa equals any of the twenty naturally occurring L-amino acids
  MISC_FEATURE (41): Xaa equals any of the twenty naturally occurring L-amino acids
  MISC_FEATURE (45): Xaa equals any of the twenty naturally occurring L-amino acids
  MISC_FEATURE (70): Xaa equals any of the twenty naturally occurring L-amino acids
  MISC_FEATURE (77): Xaa equals any of the twenty naturally occurring L-amino acids
YVGEKGPXPRQSPARLVAMPRKIEEIKDFLLTARLXDAKSXKIKXNKDNVKFKVRCSRYLYTLVITDKEXAEKLKQXLPPGLAVKELK

SEQ ID NO: 4057 - protein, 147 aa, Homo sapiens
AQAETGSGTESDSDESVPELEEQDSTQATTQQAQLAAAAEIDEEPVSKAKQSRSEKKARKAMSKLGLRQVTGVTRVTIRKSKNILFVITKPDVYKSPASDTYIVFGEAKIEDLSQQAQLAAAEKFKVQGEAVSNIQENTQTSLSRRK

SEQ ID NO: 4058 - protein, 181 aa, Homo sapiens
  MISC_FEATURE (146): Xaa equals any of the twenty naturally occurring L-amino acids
  MISC_FEATURE (171): Xaa equals any of the twenty naturally occurring L-amino acids
  MISC_FEATURE (177): Xaa equals any of the twenty naturally occurring L-amino acids
AHASGDPRHGKYMACCLLYRGDVVPKDVNAAIATIKTKRSIQFVDWCPTGFKVGINYQPPTVVPGGDLAKVQRAVCMLSNTTAIAEAWARLDHKFDLMYAKRAFVHWYVGEGMEEGEFSEAREDMAALRRIMRRLVWILLKKSEEXGRILIILPLALTCMFQIHLVTADVXLVMLLXMLLD

SEQ ID NO: 4059 - protein, 51 aa, Homo sapiens
FLVHVYYLFLIDFWKQDFIEISLVFLLIYLFDFIMCFSFAEEHCCSLEGFS

SEQ ID NO: 4060 - protein, 110 aa, Homo sapiens
PRVRESCGIHETTFNSIMKCDVDIRKDLYANTVLSGGTTMYPGIADRMQKEITALAPSTMKIKIIAPPERKYSVWIGGSILASLSTFQQMWISKQEYDESGPSIVHRKCF

SEQ ID NO: 4061 - protein, 169 aa, Homo sapiens
VLLAMVNPTVFFDIAVDGEPLGRVSFELFADKVPKTAENFRALSTGEKGFGYKGSCFHRIIPGFMCQGGDFTRHNGTGGKSIYGEKFEDENFILKHTGPGILSMANAGPNTNGSQFFICTAKTEWLDGKHVVFGKVKEGMNIVEAMERFGSRNGKTSKKITIADCGQLE

SEQ ID NO: 4062 - protein, 52 aa, Homo sapiens
KMMLLQLALPQKLGPTKVCQPCFLKRGYESQRPHPRQAIMSRVYSSFNKMCQ

SEQ ID NO: 4063 - protein, 186 aa, Homo sapiens
  MISC_FEATURE (76): Xaa equals any of the twenty naturally occurring L-amino acids
  MISC_FEATURE (77): Xaa equals any of the twenty naturally occurring L-amino acids
  MISC_FEATURE (86): Xaa equals any of the twenty naturally occurring L-amino acids
  MISC_FEATURE (107): Xaa equals any of the twenty naturally occurring L-amino acids
  MISC_FEATURE (123): Xaa equals any of the twenty naturally occurring L-amino acids
  MISC_FEATURE (124): Xaa equals any of the twenty naturally occurring L-amino acids
  MISC_FEATURE (136): Xaa equals any of the twenty naturally occurring L-amino acids
  MISC_FEATURE (148): Xaa equals any of the twenty naturally occurring L-amino acids
  MISC_FEATURE (163): Xaa equals any of the twenty naturally occurring L-amino acids
  MISC_FEATURE (174): Xaa equals any of the twenty naturally occurring L-amino acids
  MISC_FEATURE (175): Xaa equals any of the twenty naturally occurring L-amino acids
  MISC_FEATURE (176): Xaa equals any of the twenty naturally occurring L-amino acids
  MISC_FEATURE (180): Xaa equals any of the twenty naturally occurring L-amino acids
YAKANAQTDRVALRNLLRRYNQSEAGSHTLQGMNGCDMGPDGRLLRGYHQHAYDGKDYISLNEDLRSWTAVETVAXXHPSAFMKAXGILHREVQGPTWKGEVPGSLXRKILWRNGKGERFKRXXILPKGHTVCPTXPSLTMKATLEGXWALGFLPCGDTLTWXRDGEEQDPGHXXXGEQXCRDGTF

SEQ ID NO: 4064 - protein, 65 aa, Homo sapiens
GTVPACKEHRVNKATVVLRGALDRVQGHMVEGTGCFAEWGGASLCRELDFRDRTRRSCWRYGKLN

SEQ ID NO: 4065 - protein, 111 aa, Homo sapiens
  MISC_FEATURE (1): Xaa equals any of the twenty naturally occurring L-amino acids
  MISC_FEATURE (2): Xaa equals any of the twenty naturally occurring L-amino acids
  MISC_FEATURE (7): Xaa equals any of the twenty naturally occurring L-amino acids
  MISC_FEATURE (11): Xaa equals any of the twenty naturally occurring L-amino acids
  MISC_FEATURE (22): Xaa equals any of the twenty naturally occurring L-amino acids
  MISC_FEATURE (87): Xaa equals any of the twenty naturally occurring L-amino acids
  MISC_FEATURE (98): Xaa equals any of the twenty naturally occurring L-amino acids
  MISC_FEATURE (101): Xaa equals any of the twenty naturally occurring L-amino acids
  MISC_FEATURE (108): Xaa equals any of the twenty naturally occurring L-amino acids
  MISC_FEATURE (109): Xaa equals any of the twenty naturally occurring L-amino acids
  MISC_FEATURE (111): Xaa equals any of the twenty naturally occurring L-amino acids
XXPRLQXPGPXFPGRPTRPASXSSVSSPSPGLPRRSAPPSPLCRSLSPGTGGGVRGGVGYLSRGDPVRVLARRVRPDGSVQTWLSGXEGASLNSCFAXFQXTHGLYIXXFX

SEQ ID NO: 4066 - protein, 99 aa, Homo sapiens
  MISC_FEATURE (70): Xaa equals any of the twenty naturally occurring L-amino acids
  MISC_FEATURE (75): Xaa equals any of the twenty naturally occurring L-amino acids
  MISC_FEATURE (80): Xaa equals any of the twenty naturally occurring L-amino acids
  MISC_FEATURE (88): Xaa equals any of the twenty naturally occurring L-amino acids
  MISC_FEATURE (89): Xaa equals any of the twenty naturally occurring L-amino acids
  MISC_FEATURE (90): Xaa equals any of the twenty naturally occurring L-amino acids
  MISC_FEATURE (98): Xaa equals any of the twenty naturally occurring L-amino acids
GLPKPLTLRWEPSSQPTVPIVGIIAGLVLLGAVITGAVVAAVMWRRNSSDRKGGSYSQAASSDSAQGSDXSLTVXKVKKXFLWGTDKXXXVLPALPFXT

SEQ ID NO: 4067 - protein, 82 aa, Homo sapiens
  MISC_FEATURE (8): Xaa equals any of the twenty naturally occurring L-amino acids
  MISC_FEATURE (21): Xaa equals any of the twenty naturally occurring L-amino acids
  MISC_FEATURE (23): Xaa equals any of the twenty naturally occurring L-amino acids
  MISC_FEATURE (25): Xaa equals any of the twenty naturally occurring L-amino acids
  MISC_FEATURE (33): Xaa equals any of the twenty naturally occurring L-amino acids
  MISC_FEATURE (34): Xaa equals any of the twenty naturally occurring L-amino acids
  MISC_FEATURE (44): Xaa equals any of the twenty naturally occurring L-amino acids
  MISC_FEATURE (62): Xaa equals any of the twenty naturally occurring L-amino acids
  MISC_FEATURE (72): Xaa equals any of the twenty naturally occurring L-amino acids
  MISC_FEATURE (80): Xaa equals any of the twenty naturally occurring L-amino acids
  MISC_FEATURE (82): Xaa equals any of the twenty naturally occurring L-amino acids
VVEEGLHXHLAFIFHLGGSGXAXWXKWLGKERXXGMARELRNRXLHHFFTGGWHWFPYLIPXIPSFLLWYAXSYRGNFEXRX

SEQ ID NO: 4068 - protein, 176 aa, Homo sapiens
  MISC_FEATURE (110): Xaa equals any of the twenty naturally occurring L-amino acids
GALRPSTSRSLYASSPGGVYATRSSAVRLRSSVPGVRLLQDSVDFSLADAINTEFKNTRTNEKVELQELNDRFANYIDKVRFLEQQNKILLAELEQLKGQGKSRLGDLYXEEMRELRRQVDQLTNDKARVEVERDNLAEDIMRLPEKLQEEMLQREEAENTLQSFNRMLQCVSCTS

SEQ ID NO: 4069 - protein, 99 aa, Homo sapiens
  MISC_FEATURE (61): Xaa equals any of the twenty naturally occurring L-amino acids
  MISC_FEATURE (67): Xaa equals any of the twenty naturally occurring L-amino acids
  MISC_FEATURE (81): Xaa equals any of the twenty naturally occurring L-amino acids
  MISC_FEATURE (91): Xaa equals any of the twenty naturally occurring L-amino acids
  MISC_FEATURE (93): Xaa equals any of the twenty naturally occurring L-amino acids
  MISC_FEATURE (95): Xaa equals any of the twenty naturally occurring L-amino acids
QGSRALRLQCCGPSYGPKLGSRSLSLALEAQKSLCPAPQYYHVSLSGVAETGLLIGSCTTXLFCYSXFLASCKALKVGDKXDQDNPLEPLXFXGXDAKG

SEQ ID NO: 4070 - protein, 77 aa, Homo sapiens
  MISC_FEATURE (72): Xaa equals any of the twenty naturally occurring L-amino acids
  MISC_FEATURE (76): Xaa equals any of the twenty naturally occurring L-amino acids
VLETVPRSGEVYTCQVEHPSVTSPLTVEWRAQSESAQSKMLSGVGGFVLGLLFLGAGLFIYFKNQKGHSGLXQTRXS

SEQ ID NO: 4071 - protein, 132 aa, Homo sapiens
  MISC_FEATURE (13): Xaa equals any of the twenty naturally occurring L-amino acids
  MISC_FEATURE (17): Xaa equals any of the twenty naturally occurring L-amino acids
  MISC_FEATURE (115): Xaa equals any of the twenty naturally occurring L-amino acids
  MISC_FEATURE (118): Xaa equals any of the twenty naturally occurring L-amino acids
  MISC_FEATURE (132): Xaa equals any of the twenty naturally occurring L-amino acids
RPQKFLGLPHFPXPQFXLPEGPSQGYIPTPQFSLREINLPEINQGRCDSKGHGPHGRGGVFMREGPKALVGGPPLSLSEGPALSAFRLRPLGRDATPAPSEDVPSPLTGPLLETXPVXPSKSLSCSSLKKKX

SEQ ID NO: 4072 - protein, 107 aa, Homo sapiens
  MISC_FEATURE (86): Xaa equals any of the twenty naturally occurring L-amino acids
PGPAGERGHPGAPGPSGSPGLPGVPGSMGDMVNYDEIKRFIRQEIIKMFDERMAYYTSRMQFPMEMAAAPGRPGPPGKDGASGRPXASGSPGLPGQIGREGRQACQE

SEQ ID NO: 4073 - protein, 118 aa, Homo sapiens
  MISC_FEATURE (96): Xaa equals any of the twenty naturally occurring L-amino acids
QRNTLVRLQVPVRNSRVDPRVRKERGIGDIKILQNYDNKQVRIVMRRDQVLKLCANHRITPDMSLQNMKGTERVWVWTACDFADGERKVEHLAVRXKLQDVADSFKKIFDEAKTAQEL

SEQ ID NO: 4074 - protein, 169 aa, Homo sapiens
  MISC_FEATURE (74): Xaa equals any of the twenty naturally occurring L-amino acids
  MISC_FEATURE (107): Xaa equals any of the twenty naturally occurring L-amino acids
  MISC_FEATURE (112): Xaa equals any of the twenty naturally occurring L-amino acids
  MISC_FEATURE (123): Xaa equals any of the twenty naturally occurring L-amino acids
  MISC_FEATURE (127): Xaa equals any of the twenty naturally occurring L-amino acids
  MISC_FEATURE (134): Xaa equals any of the twenty naturally occurring L-amino acids
  MISC_FEATURE (155): Xaa equals any of the twenty naturally occurring L-amino acids
  MISC_FEATURE (156): Xaa equals any of the twenty naturally occurring L-amino acids
  MISC_FEATURE (159): Xaa equals any of the twenty naturally occurring L-amino acids
  MISC_FEATURE (160): Xaa equals any of the twenty naturally occurring L-amino acids
  MISC_FEATURE (161): Xaa equals any of the twenty naturally occurring L-amino acids
  MISC_FEATURE (163): Xaa equals any of the twenty naturally occurring L-amino acids
REVATDHKAFYVLFTWDQEAQIYELVAQTVSERKNWCALITETAGSLKVPAPASRPKPRPSPSSTREPLLSSSXNGNGGRETSSADARTERILSDLLPSADQAPRAXLVATXLRKCCPEATSXSGGXKQWGGPXRDGDGVPRGRAPEPSMDPGNXXRTXXXLXENHETT

SEQ ID NO: 4075 - protein, 97 aa, Homo sapiens
  MISC_FEATURE (5): Xaa equals any of the twenty naturally occurring L-amino acids
  MISC_FEATURE (9): Xaa equals any of the twenty naturally occurring L-amino acids
  MISC_FEATURE (16): Xaa equals any of the twenty naturally occurring L-amino acids
SKVFXKGPXAKLFQPXLTKGPPRAQASREGLAGPLPLSSSSGHTPVTSGFERPCGKTSWDARTPWAEGGPLVLEAQNPRPTRLCDLFITGEDFDDDV

SEQ ID NO: 4076 - protein, 46 aa, Homo sapiens
  MISC_FEATURE (6): Xaa equals any of the twenty naturally occurring L-amino acids
  MISC_FEATURE (8): Xaa equals any of the twenty naturally occurring L-amino acids
  MISC_FEATURE (22): Xaa equals any of the twenty naturally occurring L-amino acids
  MISC_FEATURE (23): Xaa equals any of the twenty naturally occurring L-amino acids
  MISC_FEATURE (40): Xaa equals any of the twenty naturally occurring L-amino acids
PLLREXLXKQPVLSQTEARDLXXRFMRVLYYRDARSYNRXRDVLGT

SEQ ID NO: 4077 - protein, 92 aa, Homo sapiens
  MISC_FEATURE (85): Xaa equals any of the twenty naturally occurring L-amino acids
  MISC_FEATURE (92): Xaa equals any of the twenty naturally occurring L-amino acids
LPSGKQNSTCKNQLPRQKMIRCHFWVTRKGHRISLNFGTDPHILGPEVCPESSRWLCLAVEPSSLAVPGLRLPLPSSCCLSSDQXTTMPPPX

SEQ ID NO: 4078 - protein, 259 aa, Homo sapiens
  MISC_FEATURE (14): Xaa equals any of the twenty naturally occurring L-amino acids
  MISC_FEATURE (238): Xaa equals any of the twenty naturally occurring L-amino acids
  MISC_FEATURE (239): Xaa equals any of the twenty naturally occurring L-amino acids
  MISC_FEATURE (240): Xaa equals any of the twenty naturally occurring L-amino acids
GKGRLIWESWYACXYRSGIPGSTHASADAWAVLRGGKYAATSQVLLPSKDVMQGTDEHVVCKVQHPNGNKEKNVPLPVIAELPPKVSVFVPPRDGFFGNPRKSKLICQATGFSPRQIQVSWLREGKQVGSGVTTDQVQAEAKESGPTTYKVTSTLTIKESDWLGQSMFTCRVDHRGLTFQQNASSMCVPDQDTAIRVFAIPPSFASIFLTKSTKLTCLVTDLTTYYSVTISWTRQNGXXXKTHTNIFQSHPNATFNALG

SEQ ID NO: 4079 - protein, 29 aa, Homo sapiens
ILNPFPHSSFHSLKTALETAPTIALPDSS

SEQ ID NO: 4080 - protein, 44 aa, Homo sapiens
LPAPGMLPKQPRPLASMADDLSFHTGEVCVPILQPHPMGPLKTH

SEQ ID NO: 4081 - protein, 108 aa, Homo sapiens
  MISC_FEATURE (99): Xaa equals any of the twenty naturally occurring L-amino acids
SATITCLVTGFSPADVFVQWMQRGQPLSPEKYVTSAPMPEPQAPGRYFAHSILTVSEEEWNTGETYTCVVAHEALPNRVTERTVDKSTGKPTLYNVSLXMSDTAGTCY

SEQ ID NO: 4082 - protein, 86 aa, Homo sapiens
GKLKCKRCDLSGGLRYGGEVDSGIWGMANILRRVLKVFGGKWLILGVHQGSVESTSALETTNQLAPFTAISKMAASVLEKKEQHQQ

SEQ ID NO: 4083 - protein, 170 aa, Homo sapiens
  MISC_FEATURE (61): Xaa equals any of the twenty naturally occurring L-amino acids
ADAWAVSLSNAVKILLRWVTRYSCPRAFVTGMPKRGKKGAVAEDGDELRTEPEAKKSKTAXKKNDKEAAGEGPALYEDPPDQKTSPSGKPATLKICSWNVDGLRAWIKKKGLDWVKEEIDLRNPKGNKKNAGFTPQERQGFGELLQAVPLLTALGTSTPTHPMPTPFGLI

SEQ ID NO: 4084 - protein, 112 aa, Homo sapiens
EDYQAAEETAFVVDEVSNIVKEAIESAIGGNAYQHSKVNQWTTNVVEQTLSQLTKLGKPFKYIVTCVIMQKNGAGLHTASSCFWDSSTDGSCTVRWENKTMYCIVSAFGLSI

SEQ ID NO: 4085 - protein, 141 aa, Homo sapiens
  MISC_FEATURE (109): Xaa equals any of the twenty naturally occurring L-amino acids
AGLVVRGTQVSYIGQDCREIPEHLGRDCGHFAKRLDLSFNLLRSLEGLSAFRSLEELILDNNQLGDDLVLPGLPRLHTLTLNKNRITDLENLLDHLAEVTPALEYLSLXGNVACPNELVSLEKDEEDYKRYRCFVCTSCPT

SEQ ID NO: 4086 - protein, 179 aa, Homo sapiens
  MISC_FEATURE (76): Xaa equals any of the twenty naturally occurring L-amino acids
  MISC_FEATURE (136): Xaa equals any of the twenty naturally occurring L-amino acids
  MISC_FEATURE (155): Xaa equals any of the twenty naturally occurring L-amino acids
  MISC_FEATURE (156): Xaa equals any of the twenty naturally occurring L-amino acids
  MISC_FEATURE (162): Xaa equals any of the twenty naturally occurring L-amino acids
SPARPLIRSDKMKETIMNQEKLAKLQAQVRIGGKGTARRKKKVVHRTATADDKKLQFSLKKLGVNNISGIEKVNMXTNQGTVIHFNNPKVQASLAANTFTITGHAETKQLTEMLPSILNQLGADSLTSLRRLAEAXAQTILWMEKHHLLLERMMXXKVPDFXENLMRLSRMRQTELSNF

SEQ ID NO: 4087 - protein, 232 aa, Homo sapiens
  MISC_FEATURE (8): Xaa equals any of the twenty naturally occurring L-amino acids
  MISC_FEATURE (9): Xaa equals any of the twenty naturally occurring L-amino acids
  MISC_FEATURE (10): Xaa equals any of the twenty naturally occurring L-amino acids
  MISC_FEATURE (17): Xaa equals any of the twenty naturally occurring L-amino acids
  MISC_FEATURE (18): Xaa equals any of the twenty naturally occurring L-amino acids
  MISC_FEATURE (35): Xaa equals any of the twenty naturally occurring L-amino acids
  MISC_FEATURE (183): Xaa equals any of the twenty naturally occurring L-amino acids
  MISC_FEATURE (190): Xaa equals any of the twenty naturally occurring L-amino acids
  MISC_FEATURE (204): Xaa equals any of the twenty naturally occurring L-amino acids
  MISC_FEATURE (213): Xaa equals any of the twenty naturally occurring L-amino acids
  MISC_FEATURE (217): Xaa equals any of the twenty naturally occurring L-amino acids
  MISC_FEATURE (219): Xaa equals any of the twenty naturally occurring L-amino acids
  MISC_FEATURE (222): Xaa equals any of the twenty naturally occurring L-amino acids
RGATKGGXXXHGPAGTXXGTGPEFPGRPTRPGERXEHAMKASGTLREYKVVGRCLPTPKCHTPPLYRMRIFAPNHVVAKSRFWYFVSQLKKMKKSSGEIVYCGQVFEKSPLRVKNFGIWLRYDSRSGTHNMYREYRDLTTAGAVTQCYRDMGARHRARAHSIQIMKVEEIAASKCRRPLSSSXTTSRSSXRCPPGPAPSDKARXTTKKANTSXKCKXLXPGXAPNKLKERPG

SEQ ID NO: 4088 - protein, 86 aa, Homo sapiens
  MISC_FEATURE (2): Xaa equals any of the twenty naturally occurring L-amino acids
  MISC_FEATURE (55): Xaa equals any of the twenty naturally occurring L-amino acids
  MISC_FEATURE (79): Xaa equals any of the twenty naturally occurring L-amino acids
  MISC_FEATURE (81): Xaa equals any of the twenty naturally occurring L-amino acids
  MISC_FEATURE (84): Xaa equals any of the twenty naturally occurring L-amino acids
LXYLHYLIFLIPSFGLVTTITLCEHFSRWLEEGRKPDIANAAVVVSSASSHCAVXCPHMCTGNRLTQLMNAFLSLCVEXGXHLXIC

SEQ ID NO: 4089 - protein, 101 aa, Homo sapiens
GTPHPDDFANDDIDSYMIAMETTIGNEGSRVLPSISLSPGPQPPKSPGPHSEEEDEAEPSTVPGTPPPKKFRSLFFGSILAPVRSPQGPSPVLAEDSEGEG

SEQ ID NO: 4090 - protein, 97 aa, Homo sapiens
  MISC_FEATURE (77): Xaa equals any of the twenty naturally occurring L-amino acids
  MISC_FEATURE (79): Xaa equals any of the twenty naturally occurring L-amino acids
VIPRAQQRDQVSRALKTRGNTPKYGLIFHSTFIGRAAAKNKGRISRYLANKCSIASRIDCFSEVPTSVFGEKLREQXEXPTGPSMRLERYHERIWMS

SEQ ID NO: 4091 - protein, 88 aa, Homo sapiens
QQNPALCSTCGLKPSKPQSPSEALEDHLLLRGRDPRPNSPTPAPDRDPQGPTPPVESAASPHYPSLLQNLSLFHLLLMLLSISLCQVQ

SEQ ID NO: 4092 - protein, 192 aa, Homo sapiens
  MISC_FEATURE (179): Xaa equals any of the twenty naturally occurring L-amino acids
  MISC_FEATURE (185): Xaa equals any of the twenty naturally occurring L-amino acids
ARTPEVTCVVVDVSHEDPEVKFNWYVDGVEVHNAKTKPREEQYNSTYRVVSVLTVLHQDWLNGKEYKCKVSNKALPAPIEKTISKAKGQPREPQVYTLPPSREEMTKNQVSLTCLVKGFYPSDIAVEWESNGQPENNYKTTPPVLDSDGSFFLYSKLTVDKSRWQQGNVFSCSVMHEAXHNHYTXKSFSLSR

SEQ ID NO: 4093 - protein, 135 aa, Homo sapiens
EKSATMPAALRPRAVARHYHGVCNGGPRHAAHARQRPADRCSPATARVCALGHRQWETLGRSDPAPYPCLPVVPGQEAGCLPFLNQLPQECLLQVMAGELRRAHGRRVGTRLPAFFSDPDPRHLLLTNWKILCIP

SEQ ID NO: 4094 - protein, 155 aa, Homo sapiens
  MISC_FEATURE (67): Xaa equals any of the twenty naturally occurring L-amino acids
  MISC_FEATURE (135): Xaa equals any of the twenty naturally occurring L-amino acids
  MISC_FEATURE (152): Xaa equals any of the twenty naturally occurring L-amino acids
ERSREDLSALTRQGRYPPYERVVLREASFKRPVVILGPVADIAMQKLTAEMPDQFEIAETVSKDRQXLQDHQTRHRAGDCRKRQACAPGCDPLRHRAPQLCAVLPHCGLLHPREPAGLKALRQWLAPASRRRPVXSTTSPELRKHSSHLLQXPSL

SEQ ID NO: 4095 - protein, 92 aa, Homo sapiens
  MISC_FEATURE (26): Xaa equals any of the twenty naturally occurring L-amino acids
  MISC_FEATURE (54): Xaa equals any of the twenty naturally occurring L-amino acids
  MISC_FEATURE (56): Xaa equals any of the twenty naturally occurring L-amino acids
  MISC_FEATURE (60): Xaa equals any of the twenty naturally occurring L-amino acids
  MISC_FEATURE (61): Xaa equals any of the twenty naturally occurring L-amino acids
  MISC_FEATURE (80): Xaa equals any of the twenty naturally occurring L-amino acids
  MISC_FEATURE (82): Xaa equals any of the twenty naturally occurring L-amino acids
  MISC_FEATURE (85): Xaa equals any of the twenty naturally occurring L-amino acids
PRSPPTRPARTAVLINRDAPSLKKEXMVSPQPWATLASDSKWNYLARVRLEGAXSXATLXXTLPEDRWELLIVPKSYYCXFXGSXVHTLLSA

SEQ ID NO: 4096 - protein, 131 aa, Homo sapiens
  MISC_FEATURE (4): Xaa equals any of the twenty naturally occurring L-amino acids
  MISC_FEATURE (25): Xaa equals any of the twenty naturally occurring L-amino acids
  MISC_FEATURE (31): Xaa equals any of the twenty naturally occurring L-amino acids
  MISC_FEATURE (33): Xaa equals any of the twenty naturally occurring L-amino acids
  MISC_FEATURE (52): Xaa equals any of the twenty naturally occurring L-amino acids
  MISC_FEATURE (55): Xaa equals any of the twenty naturally occurring L-amino acids
  MISC_FEATURE (56): Xaa equals any of the twenty naturally occurring L-amino acids
  MISC_FEATURE (70): Xaa equals any of the twenty naturally occurring L-amino acids
  MISC_FEATURE (75): Xaa equals any of the twenty naturally occurring L-amino acids
  MISC_FEATURE (83): Xaa equals any of the twenty naturally occurring L-amino acids
  MISC_FEATURE (99): Xaa equals any of the twenty naturally occurring L-amino acids
  MISC_FEATURE (104): Xaa equals any of the twenty naturally occurring L-amino acids
  MISC_FEATURE (105): Xaa equals any of the twenty naturally occurring L-amino acids
  MISC_FEATURE (106): Xaa equals any of the twenty naturally occurring L-amino acids
  MISC_FEATURE (108): Xaa equals any of the twenty naturally occurring L-amino acids
  MISC_FEATURE (117): Xaa equals any of the twenty naturally occurring L-amino acids
  MISC_FEATURE (118): Xaa equals any of the twenty naturally occurring L-amino acids
  MISC_FEATURE (119): Xaa equals any of the twenty naturally occurring L-amino acids
  MISC_FEATURE (120): Xaa equals any of the twenty naturally occurring L-amino acids
  MISC_FEATURE (125): Xaa equals any of the twenty naturally occurring L-amino acids
  MISC_FEATURE (131): Xaa equals any of the twenty naturally occurring L-amino acids
GKLXQPAGTRSGIPGSDPRVRPRAXHSVRRXPXRPARPGAGEQQQQQEGYLXGRXXQAGGRVDEQDGGGXAAEAXAQPAEADXEAVRYGGPGRLGCPWXGAGYXXXLXRSGDVVSVXXXXPLSTXVIPGAX

SEQ ID NO: 4097 - protein, 94 aa, Homo sapiens
  MISC_FEATURE (6): Xaa equals any of the twenty naturally occurring L-amino acids
  MISC_FEATURE (15): Xaa equals any of the twenty naturally occurring L-amino acids
  MISC_FEATURE (16): Xaa equals any of the twenty naturally occurring L-amino acids
  MISC_FEATURE (26): Xaa equals any of the twenty naturally occurring L-amino acids
  MISC_FEATURE (33): Xaa equals any of the twenty naturally occurring L-amino acids
  MISC_FEATURE (43): Xaa equals any of the twenty naturally occurring L-amino acids
  MISC_FEATURE (46): Xaa equals any of the twenty naturally occurring L-amino acids
  MISC_FEATURE (53): Xaa equals any of the twenty naturally occurring L-amino acids
  MISC_FEATURE (64): Xaa equals any of the twenty naturally occurring L-amino acids
  MISC_FEATURE (89): Xaa equals any of the twenty naturally occurring L-amino acids
  MISC_FEATURE (90): Xaa equals any of the twenty naturally occurring L-amino acids
YAAGLXAGPRSQLLXXLPLSRSPLLXRQTSNSXQISLSRGPLXPSXATGPWPXCHSPSCRECTXSMEALLPCQVSSPPPLSSPLSTVNXXTNLL

SEQ ID NO: 4098 - protein, 111 aa, Homo sapiens
  MISC_FEATURE (11): Xaa equals any of the twenty naturally occurring L-amino acids
  MISC_FEATURE (13): Xaa equals any of the twenty naturally occurring L-amino acids
  MISC_FEATURE (21): Xaa equals any of the twenty naturally occurring L-amino acids
  MISC_FEATURE (33): Xaa equals any of the twenty naturally occurring L-amino acids
  MISC_FEATURE (36): Xaa equals any of the twenty naturally occurring L-amino acids
  MISC_FEATURE (43): Xaa equals any of the twenty naturally occurring L-amino acids
  MISC_FEATURE (44): Xaa equals any of the twenty naturally occurring L-amino acids
  MISC_FEATURE (47): Xaa equals any of the twenty naturally occurring L-amino acids
  MISC_FEATURE (55): Xaa equals any of the twenty naturally occurring L-amino acids
  MISC_FEATURE (60): Xaa equals any of the twenty naturally occurring L-amino acids
  MISC_FEATURE (64): Xaa equals any of the twenty naturally occurring L-amino acids
  MISC_FEATURE (76): Xaa equals any of the twenty naturally occurring L-amino acids
  MISC_FEATURE (88): Xaa equals any of the twenty naturally occurring L-amino acids
  MISC_FEATURE (95): Xaa equals any of the twenty naturally occurring L-amino acids
  MISC_FEATURE (99): Xaa equals any of the twenty naturally occurring L-amino acids
  MISC_FEATURE (100): Xaa equals any of the twenty naturally occurring L-amino acids
  MISC_FEATURE (104): Xaa equals any of the twenty naturally occurring L-amino acids
  MISC_FEATURE (108): Xaa equals any of the twenty naturally occurring L-amino acids
GRCPSIDMDTXEXHQGGAQAXAQPHRRLQVPAXASXSRISRLXXKVXTLKSHNTXLASTXSLLXEQVAHLKQKVLXHRQQLAVSCCPXTRCPCTXSARXXHARXPSPXGGL

SEQ ID NO: 4099 - protein, 201 aa, Homo sapiens
  MISC_FEATURE (174): Xaa equals any of the twenty naturally occurring L-amino acids
  MISC_FEATURE (181): Xaa equals any of the twenty naturally occurring L-amino acids
  MISC_FEATURE (192): Xaa equals any of the twenty naturally occurring L-amino acids
  MISC_FEATURE (197): Xaa equals any of the twenty naturally occurring L-amino acids
VNDQEHISEERMFRSPHDAPFLPLKPGSDSGTTAVVALIRGKQLIVANAGDSRCVVSEAGKALDMSYDHKPEDEVELARIKNAGGKVTMDGRVNGGLNLSRAIGDHFYKRNKNLPPEEQMISALPDIKVLTLTDDHEFMVIACDGIWNVMSSQEVVDFIQSKINQRDENGELRXLASIVEXLLDQCLAPDTXGDGTXCDNM

SEQ ID NO: 4100 - protein, 182 aa, Homo sapiens
  MISC_FEATURE (168): Xaa equals any of the twenty naturally occurring L-amino acids
  MISC_FEATURE (178): Xaa equals any of the twenty naturally occurring L-amino acids
SHSKAKHSLPSAYRTVRRSRSRSRSPRRRAHSPERRREERSVPTAYRVSRSPGASRKRTRSRSPHEKKKKRRSRSRTKSKARSQSVSPSKQAAPRPAAPAAHSAHSASVSPVESRGSSQERSRGVSQEKEAQISSAIVSSVQSKITQDLMAKVRAMLAASKNLQTKRXLRRASGAEPXGWWL

SEQ ID NO: 4101 - protein, 63 aa, Homo sapiens
  MISC_FEATURE (18): Xaa equals any of the twenty naturally occurring L-amino acids
  MISC_FEATURE (30): Xaa equals any of the twenty naturally occurring L-amino acids
  MISC_FEATURE (31): Xaa equals any of the twenty naturally occurring L-amino acids
  MISC_FEATURE (62): Xaa equals any of the twenty naturally occurring L-amino acids
PAGTGPEFPGRPTRPAMXAARLAAAAAAQXXYAFSARPLAGGEPVSLGSLRGKVLLIENVAXL

SEQ ID NO: 4102 - protein, 189 aa, Homo sapiens
  MISC_FEATURE (3): Xaa equals any of the twenty naturally occurring L-amino acids
  MISC_FEATURE (9): Xaa equals any of the twenty naturally occurring L-amino acids
  MISC_FEATURE (28): Xaa equals any of the twenty naturally occurring L-amino acids
  MISC_FEATURE (37): Xaa equals any of the twenty naturally occurring L-amino acids
  MISC_FEATURE (46): Xaa equals any of the twenty naturally occurring L-amino acids
  MISC_FEATURE (52): Xaa equals any of the twenty naturally occurring L-amino acids
  MISC_FEATURE (53): Xaa equals any of the twenty naturally occurring L-amino acids
  MISC_FEATURE (54): Xaa equals any of the twenty naturally occurring L-amino acids
  MISC_FEATURE (63): Xaa equals any of the twenty naturally occurring L-amino acids
  MISC_FEATURE (64): Xaa equals any of the twenty naturally occurring L-amino acids
  MISC_FEATURE (66): Xaa equals any of the twenty naturally occurring L-amino acids
  MISC_FEATURE (75): Xaa equals any of the twenty naturally occurring L-amino acids
  MISC_FEATURE (76): Xaa equals any of the twenty naturally occurring L-amino acids
  MISC_FEATURE (78): Xaa equals any of the twenty naturally occurring L-amino acids
  MISC_FEATURE (79): Xaa equals any of the twenty naturally occurring L-amino acids
  MISC_FEATURE (81): Xaa equals any of the twenty naturally occurring L-amino acids
  MISC_FEATURE (89): Xaa equals any of the twenty naturally occurring L-amino acids
  MISC_FEATURE (94): Xaa equals any of the twenty naturally occurring L-amino acids
  MISC_FEATURE (96): Xaa equals any of the twenty naturally occurring L-amino acids
  MISC_FEATURE (99): Xaa equals any of the twenty naturally occurring L-amino acids
  MISC_FEATURE (101): Xaa equals any of the twenty naturally occurring L-amino acids
  MISC_FEATURE (107): Xaa equals any of the twenty naturally occurring L-amino acids
  MISC_FEATURE (111): Xaa equals any of the twenty naturally occurring L-amino acids
  MISC_FEATURE (115): Xaa equals any of the twenty naturally occurring L-amino acids
  MISC_FEATURE (116): Xaa equals any of the twenty naturally occurring L-amino acids
  MISC_FEATURE (118): Xaa equals any of the twenty naturally occurring L-amino acids
  MISC_FEATURE (137): Xaa equals any of the twenty naturally occurring L-amino acids
  MISC_FEATURE (140): Xaa equals any of the twenty naturally occurring L-amino acids
  MISC_FEATURE (157): Xaa equals any of the twenty naturally occurring L-amino acids
  MISC_FEATURE (171): Xaa equals any of the twenty naturally occurring L-amino acids
  MISC_FEATURE (181): Xaa equals any of the twenty naturally occurring L-amino acids
  MISC_FEATURE (188): Xaa equals any of the twenty naturally occurring L-amino acids
GLXSSQILXTMPASFCMIDNARLAADDXRVKYETELXMRQSEENDXHGLRKXXXDTNITRLQXXTXIEALKEELXXMXXNXEEEVKGLXAQIAXSXVTXEXDAPKSXDLAXIMAXXLXQYDELARKNREELDKYWLXRLXRAPQWSPHKLLRLELAXTTLTELRRTVQSLXIELDSMRKSXRPAWENXP

SEQ ID NO: 4103 - protein, 100 aa, Homo sapiens
  MISC_FEATURE (2): Xaa equals any of the twenty naturally occurring L-amino acids
  MISC_FEATURE (30): Xaa equals any of the twenty naturally occurring L-amino acids
FXLGTWPACRYRSGIPGSTHFVWKGPSLTXASRSKGHGAARVLSHATHSHGQESNQMRGNVCVPGAHPTPLPSVPMCTRRHCQWACSRSTWDKKSPSSVG

SEQ ID NO: 4104 - protein, 186 aa, Homo sapiens
  MISC_FEATURE (2): Xaa equals any of the twenty naturally occurring L-amino acids
  MISC_FEATURE (6): Xaa equals any of the twenty naturally occurring L-amino acids
  MISC_FEATURE (10): Xaa equals any of the twenty naturally occurring L-amino acids
  MISC_FEATURE (22): Xaa equals any of the twenty naturally occurring L-amino acids
  MISC_FEATURE (134): Xaa equals any of the twenty naturally occurring L-amino acids
  MISC_FEATURE (139): Xaa equals any of the twenty naturally occurring L-amino acids
  MISC_FEATURE (149): Xaa equals any of the twenty naturally occurring L-amino acids
  MISC_FEATURE (165): Xaa equals any of the twenty naturally occurring L-amino acids
  MISC_FEATURE (173): Xaa equals any of the twenty naturally occurring L-amino acids
  MISC_FEATURE (176): Xaa equals any of the twenty naturally occurring L-amino acids
NXPTHXRESXYACRYRSGIPGXTHAFGEAPDPHAARTELSAPLPATASRASLSSNMAKISSPTETERCIESLIAVFQKYAGKDGYNYTLSKTEFLSFMNTELAAFTKNQKDPGVLDRMMKKLDTNSDGQLDFSXFLNLXGGLAMACHDXFLKGGPSRSGPEDPLXLGFKPTPXLQXFWHHFPGHHP

SEQ ID NO: 4105 - protein, 44 aa, Homo sapiens
RKERGCLERPHCIREDLEARMLILGRWVPQAYSRSRGPWDEGLI

SEQ ID NO: 4106 - protein, 51 aa, Homo sapiens
  MISC_FEATURE (29): Xaa equals any of the twenty naturally occurring L-amino acids
  MISC_FEATURE (50): Xaa equals any of the twenty naturally occurring L-amino acids
VTTPPFLFPLAPLLLGHSPESQGVISGAXFLIILFCFIPFPFLNCFVKEXV

SEQ ID NO: 4107 - protein, 130 aa, Homo sapiens
AHASGRRPLAQRPLPHTHTHTRPPTVLGALEAGGPSPTCCFVLWFSPPWVQKCCLPVCLSICLVGVELIQSTDLFRALEDPTQAWQPSSCILGLPSSPGSPLPGPTSARWAEPLPHTRPSSRALPWKPAC

SEQ ID NO: 4108 - protein, 86 aa, Homo sapiens
  MISC_FEATURE (4): Xaa equals any of the twenty naturally occurring L-amino acids
  MISC_FEATURE (7): Xaa equals any of the twenty naturally occurring L-amino acids
  MISC_FEATURE (10): Xaa equals any of the twenty naturally occurring L-amino acids
  MISC_FEATURE (14): Xaa equals any of the twenty naturally occurring L-amino acids
  MISC_FEATURE (26): Xaa equals any of the twenty naturally occurring L-amino acids
  MISC_FEATURE (27): Xaa equals any of the twenty naturally occurring L-amino acids
  MISC_FEATURE (30): Xaa equals any of the twenty naturally occurring L-amino acids
  MISC_FEATURE (31): Xaa equals any of the twenty naturally occurring L-amino acids
  MISC_FEATURE (39): Xaa equals any of the twenty naturally occurring L-amino acids
  MISC_FEATURE (41): Xaa equals any of the twenty naturally occurring L-amino acids
  MISC_FEATURE (42): Xaa equals any of the twenty naturally occurring L-amino acids
  MISC_FEATURE (56): Xaa equals any of the twenty naturally occurring L-amino acids
  MISC_FEATURE (61): Xaa equals any of the twenty naturally occurring L-amino acids
  MISC_FEATURE (63): Xaa equals any of the twenty naturally occurring L-amino acids
  MISC_FEATURE (70): Xaa equals any of the twenty naturally occurring L-amino acids
  MISC_FEATURE (80): Xaa equals any of the twenty naturally occurring L-amino acids
  MISC_FEATURE (84): Xaa equals any of the twenty naturally occurring L-amino acids
CSQXALXSKXCNWXGMMSDSAQGSSXXTKXXARNFFGLXRXXELPEAPAPCASGLXHRLLXKXIDTQVEXVGEARSHSTXPSPXSL

SEQ ID NO: 4109 - protein, 73 aa, Homo sapiens
TFCRGHCLLHGAPFMRDLAAVASVGLPLLRRQAQVAAGRVLVVALFGGCGGLHSRLDGAAICLPDRTRGRTRG

SEQ ID NO: 4110 - protein, 117 aa, Homo sapiens
SKMTKKRRNNGRAKKGRGHVQPIRCTNCARCVPKDKAIKKFVIRNIVEAAAVRDISEASVFDAYVLPKLYVKLHYCVSCAIHSKVVRNRSREARKDRTPPPRFRPAGAAPRPPPKPM

SEQ ID NO: 4111 - protein, 126 aa, Homo sapiens
GLKLPGGSCMAALTVTLTVLSSPLALAGDTQPRFLEQAKCECHFLNGTERVWNLIRYIYNQEEYARYNSDLGEYQAVTELGRPDAEYWNSQKDLLERRRPEVDTYCRYNYRGLWRASQCSGESNLR

SEQ ID NO: 4112 - protein, 40 aa, Homo sapiens
  MISC_FEATURE (10): Xaa equals any of the twenty naturally occurring L-amino acids
  MISC_FEATURE (14): Xaa equals any of the twenty naturally occurring L-amino acids
  MISC_FEATURE (17): Xaa equals any of the twenty naturally occurring L-amino acids
  MISC_FEATURE (18): Xaa equals any of the twenty naturally occurring L-amino acids
  MISC_FEATURE (20): Xaa equals any of the twenty naturally occurring L-amino acids
RPPYYTPNQXAQMXPNXXWXEGGRPQGFQGMPSAIRQSDP

SEQ ID NO: 4113 - protein, 104 aa, Homo sapiens
  MISC_FEATURE (32): Xaa equals any of the twenty naturally occurring L-amino acids
  MISC_FEATURE (34): Xaa equals any of the twenty naturally occurring L-amino acids
  MISC_FEATURE (75): Xaa equals any of the twenty naturally occurring L-amino acids
  MISC_FEATURE (76): Xaa equals any of the twenty naturally occurring L-amino acids
  MISC_FEATURE (82): Xaa equals any of the twenty naturally occurring L-amino acids
  MISC_FEATURE (91): Xaa equals any of the twenty naturally occurring L-amino acids
  MISC_FEATURE (96): Xaa equals any of the twenty naturally occurring L-amino acids
  MISC_FEATURE (102): Xaa equals any of the twenty naturally occurring L-amino acids
EGTHSAINSLNPLYLGIREWNLVCFLQDFPIXNXGKYRAPFICFSSLMHQKSKTFLNQDNLRREKKEEKGKEKAXXDQIKSXWAKTGNNKXIHLTXSIITIXCK

SEQ ID NO: 4114 - protein, 169 aa, Homo sapiens
  MISC_FEATURE (20): Xaa equals any of the twenty naturally occurring L-amino acids
  MISC_FEATURE (22): Xaa equals any of the twenty naturally occurring L-amino acids
TGPEFPGRPTRPLLQSRSCXQXQAETGSGTESDSDESVPELEEQDSTQATTQQAQLAAAAEIDEEPVSKAKQSRSEKKARKAMSKLGLRQVTGVTRVTIRKSKNILFVITKPDVYKSPASDTYIVFGEAKIEDLSQQAQLAAAEKFKVQGEAVSNIQENTQDFNCTRGE

SEQ ID NO: 4115 - protein, 58 aa, Homo sapiens
FPDSNFKSTHRSCQISSGYSNLGLVLQGTKNKNPSEILGNHSLLLFIWAIIVCVRMEG

SEQ ID NO: 4116 - protein, 129 aa, Homo sapiens
  MISC_FEATURE (1): Xaa equals any of the twenty naturally occurring L-amino acids
  MISC_FEATURE (2): Xaa equals any of the twenty naturally occurring L-amino acids
  MISC_FEATURE (6): Xaa equals any of the twenty naturally occurring L-amino acids
  MISC_FEATURE (9): Xaa equals any of the twenty naturally occurring L-amino acids
  MISC_FEATURE (25): Xaa equals any of the twenty naturally occurring L-amino acids
  MISC_FEATURE (57): Xaa equals any of the twenty naturally occurring L-amino acids
XXTLGXGAXPAGTGPEFPGRPTRPXWLSCQEGGSWSGTEPSCQDSFMYDTPQEVAEXFLSSLTETIEGVDAEDGHGPGEQQKRKIVLDPSGSMNIYLVLDGSDSIGASNFTGAKKCLVNLIEKVESSYP

SEQ ID NO: 4117 - protein, 45 aa, Homo sapiens
  MISC_FEATURE (5): Xaa equals any of the twenty naturally occurring L-amino acids
  MISC_FEATURE (7): Xaa equals any of the twenty naturally occurring L-amino acids
  MISC_FEATURE (13): Xaa equals any of the twenty naturally occurring L-amino acids
  MISC_FEATURE (24): Xaa equals any of the twenty naturally occurring L-amino acids
  MISC_FEATURE (39): Xaa equals any of the twenty naturally occurring L-amino acids
  MISC_FEATURE (45): Xaa equals any of the twenty naturally occurring L-amino acids
NYFKXLXLNRLTXINTLIISVNTXFQNTFNWFLMLCIIXYNLERX

SEQ ID NO: 4118 - protein, 195 aa, Homo sapiens
  MISC_FEATURE (158): Xaa equals any of the twenty naturally occurring L-amino acids
  MISC_FEATURE (175): Xaa equals any of the twenty naturally occurring L-amino acids
  MISC_FEATURE (193): Xaa equals any of the twenty naturally occurring L-amino acids
  MISC_FEATURE (195): Xaa equals any of the twenty naturally occurring L-amino acids
GGFSAAAKLVSEKLASYQAARKDSGSPNPARGHSVCSTSSLYLQDLSAAASECIDPSVVFPYPLNDSSSPKSCASQDSSAFSPSSDSLLSSTESSPQGSPEPLVLHEETPPTTSSDSEEEQEDEEEIDVVSVEKRQAPGKRSESGSPSAGGHSKPPTXHWSSRGATSPHISTTTXGLLHSEGLSCLPRRVKVXQX

SEQ ID NO: 4119 - protein, 82 aa, Homo sapiens
  MISC_FEATURE (7): Xaa equals any of the twenty naturally occurring L-amino acids
  MISC_FEATURE (8): Xaa equals any of the twenty naturally occurring L-amino acids
  MISC_FEATURE (10): Xaa equals any of the twenty naturally occurring L-amino acids
  MISC_FEATURE (14): Xaa equals any of the twenty naturally occurring L-amino acids
  MISC_FEATURE (27): Xaa equals any of the twenty naturally occurring L-amino acids
  MISC_FEATURE (70): Xaa equals any of the twenty naturally occurring L-amino acids
IDLRLEXXAXRFRXGTPGSTHASAEAXSCFKMKLNISFPATGCQKLIEVDDERKLRTFYEKAVWATESWXVNASGVKKWERG

SEQ ID NO: 4120 - protein, 202 aa, Homo sapiens
  MISC_FEATURE (86): Xaa equals any of the twenty naturally occurring L-amino acids
  MISC_FEATURE (89): Xaa equals any of the twenty naturally occurring L-amino acids
  MISC_FEATURE (90): Xaa equals any of the twenty naturally occurring L-amino acids
  MISC_FEATURE (93): Xaa equals any of the twenty naturally occurring L-amino acids
  MISC_FEATURE (94): Xaa equals any of the twenty naturally occurring L-amino acids
  MISC_FEATURE (96): Xaa equals any of the twenty naturally occurring L-amino acids
  MISC_FEATURE (97): Xaa equals any of the twenty naturally occurring L-amino acids
  MISC_FEATURE (98): Xaa equals any of the twenty naturally occurring L-amino acids
  MISC_FEATURE (99): Xaa equals any of the twenty naturally occurring L-amino acids
  MISC_FEATURE (100): Xaa equals any of the twenty naturally occurring L-amino acids
  MISC_FEATURE (102): Xaa equals any of the twenty naturally occurring L-amino acids
  MISC_FEATURE (103): Xaa equals any of the twenty naturally occurring L-amino acids
  MISC_FEATURE (104): Xaa equals any of the twenty naturally occurring L-amino acids
  MISC_FEATURE (105): Xaa equals any of the twenty naturally occurring L-amino acids
  MISC_FEATURE (109): Xaa equals any of the twenty naturally occurring L-amino acids
  MISC_FEATURE (110): Xaa equals any of the twenty naturally occurring L-amino acids
  MISC_FEATURE (118): Xaa equals any of the twenty naturally occurring L-amino acids
  MISC_FEATURE (119): Xaa equals any of the twenty naturally occurring L-amino acids
  MISC_FEATURE (120): Xaa equals any of the twenty naturally occurring L-amino acids
  MISC_FEATURE (121): Xaa equals any of the twenty naturally occurring L-amino acids
  MISC_FEATURE (122): Xaa equals any of the twenty naturally occurring L-amino acids
  MISC_FEATURE (125): Xaa equals any of the twenty naturally occurring L-amino acids
  MISC_FEATURE (127): Xaa equals any of the twenty naturally occurring L-amino acids
  MISC_FEATURE (128): Xaa equals any of the twenty naturally occurring L-amino acids
  MISC_FEATURE (129): Xaa equals any of the twenty naturally occurring L-amino acids
  MISC_FEATURE (133): Xaa equals any of the twenty naturally occurring L-amino acids
  MISC_FEATURE (135): Xaa equals any of the twenty naturally occurring L-amino acids
  MISC_FEATURE (137): Xaa equals any of the twenty naturally occurring L-amino acids
  MISC_FEATURE (139): Xaa equals any of the twenty naturally occurring L-amino acids
  MISC_FEATURE (143): Xaa equals any of the twenty naturally occurring L-amino acids
  MISC_FEATURE (147): Xaa equals any of the twenty naturally occurring L-amino acids
  MISC_FEATURE (157): Xaa equals any of the twenty naturally occurring L-amino acids
  MISC_FEATURE (164): Xaa equals any of the twenty naturally occurring L-amino acids
  MISC_FEATURE (172): Xaa equals any of the twenty naturally occurring L-amino acids
  MISC_FEATURE (173): Xaa equals any of the twenty naturally occurring L-amino acids
  MISC_FEATURE (175): Xaa equals any of the twenty naturally occurring L-amino acids
  MISC_FEATURE (199): Xaa equals any of the twenty naturally occurring L-amino acids
AGQTDSHLPEPAAGEPAHEASQASQATKYGNMTEDHVMHLLQNADPLKVYPPLKGSFPENLRHLKNTMETIDWKVFESWMHHWLLXEMXXHFXXQXXXXXSXXXXLELXXPAFGLGGXXXXXGPXPXXXQQKXSXTXWXAHTXSGFXVPLGPKPFPXFPTWTLXHENLGAGXXGXLDQNNQVGTTDYMQQGPGGQFHLXQGP

SEQ ID NO: 4121 - protein, 118 aa, Homo sapiens
  MISC_FEATURE (7): Xaa equals any of the twenty naturally occurring L-amino acids
  MISC_FEATURE (42): Xaa equals any of the twenty naturally occurring L-amino acids
  MISC_FEATURE (63): Xaa equals any of the twenty naturally occurring L-amino acids
  MISC_FEATURE (74): Xaa equals any of the twenty naturally occurring L-amino acids
  MISC_FEATURE (77): Xaa equals any of the twenty naturally occurring L-amino acids
  MISC_FEATURE (84): Xaa equals any of the twenty naturally occurring L-amino acids
  MISC_FEATURE (98): Xaa equals any of the twenty naturally occurring L-amino acids
  MISC_FEATURE (100): Xaa equals any of the twenty naturally occurring L-amino acids
  MISC_FEATURE (103): Xaa equals any of the twenty naturally occurring L-amino acids
  MISC_FEATURE (111): Xaa equals any of the twenty naturally occurring L-amino acids
GVLKQAXEVPKAQRKGKEPRRKALELMSLKVQGHPLGRRRSXGHFRNPKSLALAHPKPPGTWXNLGWCNPGFPXGLXRCFPQKXPGPKEQAFKGEKIXKXLAXKGPRPKNXGRVGPKG

SEQ ID NO: 4122 - protein, 61 aa, Homo sapiens
  MISC_FEATURE (18): Xaa equals any of the twenty naturally occurring L-amino acids
  MISC_FEATURE (30): Xaa equals any of the twenty naturally occurring L-amino acids
  MISC_FEATURE (31): Xaa equals any of the twenty naturally occurring L-amino acids
  MISC_FEATURE (43): Xaa equals any of the twenty naturally occurring L-amino acids
  MISC_FEATURE (47): Xaa equals any of the twenty naturally occurring L-amino acids
  MISC_FEATURE (49): Xaa equals any of the twenty naturally occurring L-amino acids
  MISC_FEATURE (58): Xaa equals any of the twenty naturally occurring L-amino acids
HKKQPQAPSKPHGLGPLXPIKLLFTGNPRXXDWLGPWALAAFXGGEXKXLVKIIHLPXLPK

SEQ ID NO: 4123 - protein, 143 aa, Homo sapiens
QRRSGCVLRMTEWETAAPAVAETPDIKLFGKWSTDDVQINDISLQDYIAVKEKYAKYLPHSAGRYAAKRFRKAQCPIVERLTNSMMMHGRNNGKKLMTVRIVKHAFEIIHLLTGENPFAGPGERHHQQWSPGGLHTHWARRDL

SEQ ID NO: 4124 - protein, 119 aa, Homo sapiens
  MISC_FEATURE (23): Xaa equals any of the twenty naturally occurring L-amino acids
YALWYRSGIPGSTHASGFCEVRXRCWKDHCMDKHNGTDRFVNQQFQEEKLNKLQKLLILLRGLPGSGKTTLSRILLGQNRDGIVFSTDDYFHHQDGYRYNVNQLGDAHDWNQNRGFVLG

SEQ ID NO: 4125 - protein, 114 aa, Homo sapiens
AHASDESEAEGVMAGQAFRKFLPLFDRVLVERSAAETVTKGGIMLPEKSQGKVLQATVVAVGSGSKGKGGEIQPVSVKVGDKVLLPEYGGTKVVLDDKDYFLFRDGDILGKYVD

SEQ ID NO: 4126 - protein, 83 aa, Homo sapiens
  MISC_FEATURE (28): Xaa equals any of the twenty naturally occurring L-amino acids
  MISC_FEATURE (29): Xaa equals any of the twenty naturally occurring L-amino acids
LHRYPEAMASKGLQDLKQQVEGTAQEAXXAAGAAAQQVVDQATEAGQKAMDQLAKTTQETIDKTANQASDTFSGIGKKFGLLK

SEQ ID NO: 4127 - protein, 167 aa, Homo sapiens
VNMDAAVQQQMLKLMSVRLCPPVPGQALLDLVVSPPAPTDPSFAQFQAEKQAVLAELAAKAKLTEQVFNEAPGISCNPVQGAMYSFPRVQLPPRAVERAQELGLAPDMFFCLRLLEETGICVVPGSGFGQREGTYHFRMTILPPLEKLRLLLEKLSRFHAKFTLEYS

SEQ ID NO: 4128 - protein, 245 aa, Homo sapiens
  MISC_FEATURE (194): Xaa equals any of the twenty naturally occurring L-amino acids
ALERRVRKSGDCCTDSGTMNIFDRKINFDALLKFSHITPSTQQHLKKVYASFALCMFVAAAGAYVHMVTHFIQAGLLSALGSLILMIWLMATPHSHETEQKRLGLLAGFAFLTGVGLGPALEFCIAVNPSILPTAFMGTAMIFTCFTLSALYARRRSYLFLGGILMSSPELGAFASLGNGFFGSIWLFQANLYXGLVVMCGFAFLILNSLLKRPNMEIKIISGTALISLKIHYWLQKTHDEPGHE

SEQ ID NO: 4129 - protein, 235 aa, Homo sapiens
  MISC_FEATURE (12): Xaa equals any of the twenty naturally occurring L-amino acids
  MISC_FEATURE (42): Xaa equals any of the twenty naturally occurring L-amino acids
  MISC_FEATURE (59): Xaa equals any of the twenty naturally occurring L-amino acids
  MISC_FEATURE (61): Xaa equals any of the twenty naturally occurring L-amino acids
  MISC_FEATURE (73): Xaa equals any of the twenty naturally occurring L-amino acids
  MISC_FEATURE (81): Xaa equals any of the twenty naturally occurring L-amino acids
  MISC_FEATURE (91): Xaa equals any of the twenty naturally occurring L-amino acids
  MISC_FEATURE (103): Xaa equals any of the twenty naturally occurring L-amino acids
  MISC_FEATURE (127): Xaa equals any of the twenty naturally occurring L-amino acids
  MISC_FEATURE (135): Xaa equals any of the twenty naturally occurring L-amino acids
  MISC_FEATURE (140): Xaa equals any of the twenty naturally occurring L-amino acids
  MISC_FEATURE (153): Xaa equals any of the twenty naturally occurring L-amino acids
  MISC_FEATURE (196): Xaa equals any of the twenty naturally occurring L-amino acids
  MISC_FEATURE (216): Xaa equals any of the twenty naturally occurring L-amino acids
  MISC_FEATURE (220): Xaa equals any of the twenty naturally occurring L-amino acids
  MISC_FEATURE (229): Xaa equals any of the twenty naturally occurring L-amino acids
SLVSLQVPGRNXRVDPRVREDHLAVKHFSVEGQLEFRALLFXPRRAPFDLFENRKKKNXIXLYVRRVFIMDNXEELIPEYXNFIRGVVDSXDLPLNISREMLXQSKILKVIRKNLVKKCLELFTELXEDKENYKXFYEQXSKNIKLGIHEDSXNRKKLSELLRYYTSASGDEMVSLKDYCTRMKENQKHIYYITGXTKDQVANSAFVERLRKHGLXVIYXIEPIDEVLXPTAEGI

SEQ ID NO: 4130 - protein, 234 aa, Homo sapiens
  MISC_FEATURE (74): Xaa equals any of the twenty naturally occurring L-amino acids
  MISC_FEATURE (177): Xaa equals any of the twenty naturally occurring L-amino acids
  MISC_FEATURE (199): Xaa equals any of the twenty naturally occurring L-amino acids
  MISC_FEATURE (209): Xaa equals any of the twenty naturally occurring L-amino acids
  MISC_FEATURE (213): Xaa equals any of the twenty naturally occurring L-amino acids
VYHLTDEDFDQFVKEHSSVLVMFHAPWCGHCKKMKPEFEKAAEALHGEADSSGVLAAVDATVNKALAERFHISXFPTLKYFKNGEKYAVPVLRTKKKFLEWMQNPEAPPPPEPTWEEQQTSVLHLVGDNFRETLKKKKHTLVMFYAPWCPHCKKVIPHFTATADAFKDDRKIACAAXDCVKDKNQDLCQQEAVKGYPTXHYYHYGKFAXKYDXDRTEMGFTNYIRALRRETMKD

SEQ ID NO: 4131 - protein, 189 aa, Homo sapiens
  MISC_FEATURE (64): Xaa equals any of the twenty naturally occurring L-amino acids
  MISC_FEATURE (91): Xaa equals any of the twenty naturally occurring L-amino acids
  MISC_FEATURE (115): Xaa equals any of the twenty naturally occurring L-amino acids
  MISC_FEATURE (123): Xaa equals any of the twenty naturally occurring L-amino acids
  MISC_FEATURE (161): Xaa equals any of the twenty naturally occurring L-amino acids
PTRPVFLLSVQRWQVSKSPQILKYSFPVGLRTSRTDILSLKMSLQQNFSPCPRPWLSSSFPAYXSKTQCYHTSPCSFKKQQKQALLARPSXTITYLTDSPKPALCVTLAGLIPFXAPPLVMLXTKTYIPILAFTHMAYGASFLSFLGGIRCGFALPEGSPXQPDYLNLASSAAPLFFSWFAFLISERLK

SEQ ID NO: 4132 - protein, 123 aa, Homo sapiens
IELQSQLSMKAGLENSLAETECRYATQLQQIQGLIGGLEAQLSELRCEMEAQNQEYKMLLDIKTRLEQEIATYRSLLEGQDAKMAGIGIREASSGGGGSSSNFHINVEESVDGQVVSSHKREI

SEQ ID NO: 4133 - protein, 42 aa, Homo sapiens
SEWLNIQLAESMADPNRKATVCFCSYEVNGFLGKIVTLYNCC

SEQ ID NO: 4134 - protein, 62 aa, Homo sapiens
  MISC_FEATURE (46): Xaa equals any of the twenty naturally occurring L-amino acids
  MISC_FEATURE (60): Xaa equals any of the twenty naturally occurring L-amino acids
FNFKFGPQNPLNPLVNLTVSPKRNSSLDTRKKPCRESKKFNTHSRXKSSHQLRKRSSSTXTT

SEQ ID NO: 4135 - protein, 60 aa, Homo sapiens
  MISC_FEATURE (22): Xaa equals any of the twenty naturally occurring L-amino acids
  MISC_FEATURE (31): Xaa equals any of the twenty naturally occurring L-amino acids
  MISC_FEATURE (36): Xaa equals any of the twenty naturally occurring L-amino acids
  MISC_FEATURE (45): Xaa equals any of the twenty naturally occurring L-amino acids
  MISC_FEATURE (58): Xaa equals any of the twenty naturally occurring L-amino acids
FSLGGRRKNPLVSVSVHFVEPXLQAGRGKYXCPVPXSLDGRSREXPSHKWKDEILRTXNL

SEQ ID NO: 4136 - protein, 121 aa, Homo sapiens
  MISC_FEATURE (68): Xaa equals any of the twenty naturally occurring L-amino acids
  MISC_FEATURE (83): Xaa equals any of the twenty naturally occurring L-amino acids
  MISC_FEATURE (85): Xaa equals any of the twenty naturally occurring L-amino acids
  MISC_FEATURE (89): Xaa equals any of the twenty naturally occurring L-amino acids
  MISC_FEATURE (99): Xaa equals any of the twenty naturally occurring L-amino acids
  MISC_FEATURE (117): Xaa equals any of the twenty naturally occurring L-amino acids
  MISC_FEATURE (118): Xaa equals any of the twenty naturally occurring L-amino acids
VSQDAATALQPGQQCKTVSQKKKKERKKERKKERKKEKNRLKWARCDPLSWLVLGNWDYRCNHYREEXHRSTVPIPNNTKLYXLXPVFXHFGRPRQADXLRPGVQDQLAKMMSFVSXXNPK

SEQ ID NO: 4137 - protein, 218 aa, Homo sapiens
  MISC_FEATURE (2): Xaa equals any of the twenty naturally occurring L-amino acids
  MISC_FEATURE (3): Xaa equals any of the twenty naturally occurring L-amino acids
  MISC_FEATURE (13): Xaa equals any of the twenty naturally occurring L-amino acids
  MISC_FEATURE (45): Xaa equals any of the twenty naturally occurring L-amino acids
  MISC_FEATURE (175): Xaa equals any of the twenty naturally occurring L-amino acids
  MISC_FEATURE (187): Xaa equals any of the twenty naturally occurring L-amino acids
  MISC_FEATURE (196): Xaa equals any of the twenty naturally occurring L-amino acids
  MISC_FEATURE (214): Xaa equals any of the twenty naturally occurring L-amino acids
  MISC_FEATURE (215): Xaa equals any of the twenty naturally occurring L-amino acids
LXXWEKSWENCPXLGPEFPGRPTRPAGLSLFSTVFGRNRSGDSLXASDRPPISSPLATSGTIFSAISCFWDLPAPFLWLAPSCQPTMSSQIRQNYSTDVEAAVNSLVNLYLQASYTYLSLGFYFDRDDVALEGVKPLLPRIGRGEARGLRSVSEDAKPAWRRLEDPSLRTRACDXISSSIVHLNSIXGPSFTTSVXGKNPGGTQLNRLADNPPXXKLA

SEQ ID NO: 4138 - protein, 33 aa, Homo sapiens
SFLIATTNLLGLLPHSFTPTTQLSINLAMAIPL

SEQ ID NO: 4139 - protein, 58 aa, Homo sapiens
ELTHYHENSMEVTAPMIQLPPTRFLLARIMRTMGTTIQDEIWVRTQPNHIKRQLPKMM

SEQ ID NO: 4140 - protein, 62 aa, Homo sapiens
  MISC_FEATURE (4): Xaa equals any of the twenty naturally occurring L-amino acids
  MISC_FEATURE (59): Xaa equals any of the twenty naturally occurring L-amino acids
TISXLGILVYRSHLISSLLCLEGIILSLFIIATLITLNTHSLLANIVPIAILVFAACEXRWA

SEQ ID NO: 4141 - protein, 56 aa, Homo sapiens
AFLLALSKITHASIPVPVSSPSKSPRSKGTSIKHAAMQLKTLSLATPPRETAVINL

SEQ ID NO: 4142 - protein, 34 aa, Homo sapiens
  MISC_FEATURE (11): Xaa equals any of the twenty naturally occurring L-amino acids
  MISC_FEATURE (31): Xaa equals any of the twenty naturally occurring L-amino acids
  MISC_FEATURE (34): Xaa equals any of the twenty naturally occurring L-amino acids
WNPPGCRNSAXGGITLKELCLLWPVTNPGNXCCX

SEQ ID NO: 4143 - protein, 47 aa, Homo sapiens; identical to SEQ ID NO: 3421

SEQ ID NO: 4144 - protein, 26 aa, Homo sapiens
PANFCIFSRNGISPRWPGWSRTPDRK

SEQ ID NO: 4145 - protein, 133 aa, Homo sapiens
PVSAPPATPTPVPAAAPASVPAPTPAPAAAPVPAAAPASSSDPAAAAAATAAPGQTPASAQAPAQTPAPALPGPALPGPFPGGRVVRLHPVILASLWTATRDATRVLPELSGPCWELRQTLKWRSPIAFQCRQ

SEQ ID NO: 4146 - protein, 65 aa, Homo sapiens
  MISC_FEATURE (55): Xaa equals any of the twenty naturally occurring L-amino acids
NTTVWPTIITPILLTLFLITQLKILNTNYHLPPSPKPIKIKIITNPENQNEQNSXRFIHCPHNPR

SEQ ID NO: 4147 - protein, 58 aa, Homo sapiens
VGLQDATSPIIEELITFHDHALIIIFLICFLVLYALFLTLTTKLTNTNISDAQEMETV

SEQ ID NO: 4148 - protein, 204 aa, Homo sapiens
GQLSHSVLPPLRRRVSLPVAMEEEIAALVIDNGSGMCKAGFAGDDAPRAVFPSIVGRPRHQGVMVGMGQKDSYVGDEAQSKRGILTLKYPIEHGIVTNWDDMEKIWHHTFYNELRVAPEEHPVLLTEAPLNPKANREKMTQIMFETFNTPAMYVAIQAVLSLYASGRTTGIVMDSGDGVTHTVPIYEGYALPHAILRLDLAAGT

SEQ ID NO: 4149 - protein, 179 aa, Homo sapiens
IRRRKARQAKARRIAPRPASGPIRPIVRCPTVRYHTKVRAGRGFSLEELRVAGIHKKVARTIGISVDPRRRNKSTESLQTNVQRLKEYRSKLILFPRKPSAPKKGDSSAEELKLATQLTGPVMPVRNVYKKEKARVITEEEKNFKAFASLRMARANARLFGIRAKRAKEAAEQDVEKKK

SEQ ID NO: 4150 - protein, 54 aa, Homo sapiens
ARSDHLKTHTRTHTGEKPFSCRWPSCQKKFARSDELVRHHNMHQRNMTKLQLAL

SEQ ID NO: 4151 - protein, 210 aa, Homo sapiens
  MISC_FEATURE (3): Xaa equals any of the twenty naturally occurring L-amino acids
  MISC_FEATURE (181): Xaa equals any of the twenty naturally occurring L-amino acids
  MISC_FEATURE (195): Xaa equals any of the twenty naturally occurring L-amino acids
  MISC_FEATURE (203): Xaa equals any of the twenty naturally occurring L-amino acids
  MISC_FEATURE (204): Xaa equals any of the twenty naturally occurring L-amino acids
APXVAERGLKSVVWQKIKATVFDDCKKEGEWKIMLLDEFTTKLLASCCKMTDLLEEGITVVENIYKNREPVRQMKALYFITPTSKSVDCFLHDFASKSENKYKAAYIYFTDFCPDNLFNKIKASCSKSIRRCKEINISFIPHESQVYTLDVPDAFYYWYSPDPGNAKGKDAIMETMADQIXTVCATLDENPGVRXKSKPLDNXXKLAQLG

SEQ ID NO: 4152 - protein, 114 aa, Homo sapiens
APLKGSFPENLRHLKNTMETIDWKVFESWMHHWLLFEMSRHSLEQKPMQNATKYGNMTEDHVMHLLQNADPLKVYPPLKGSFPENLRHLKNTMETIDWKVFESWNWRTRLLGWV

SEQ ID NO: 4153 - protein, 97 aa, Homo sapiens
AAAVLGQLGALWIHNLRSRGKLALGVLPQSYIHTSASLDISRKWEKKNKIVYPPQLPGEPRRPAEIYHCRRQIKYSKDKMWYLAKLIRGMSIDQALA

SEQ ID NO: 4154 - protein, 63 aa, Homo sapiens
RMAGDPVANVRFNVAKSLQKIGPILDNSTLQSEVKPILEKLTQDQDVDVKYFAQEALTVLSLA

SEQ ID NO: 4155 - protein, 261 aa, Homo sapiens
  MISC_FEATURE (6): Xaa equals any of the twenty naturally occurring L-amino acids
  MISC_FEATURE (7): Xaa equals any of the twenty naturally occurring L-amino acids
  MISC_FEATURE (11): Xaa equals any of the twenty naturally occurring L-amino acids
  MISC_FEATURE (151): Xaa equals any of the twenty naturally occurring L-amino acids
  MISC_FEATURE (200): Xaa equals any of the twenty naturally occurring L-amino acids
  MISC_FEATURE (221): Xaa equals any of the twenty naturally occurring L-amino acids
  MISC_FEATURE (243): Xaa equals any of the twenty naturally occurring L-amino acids
  MISC_FEATURE (245): Xaa equals any of the twenty naturally occurring L-amino acids
  MISC_FEATURE (261): Xaa equals any of the twenty naturally occurring L-amino acids
RNTSSXXFLHXPLRNSRVDPRVRSLVVQLRLVSSVSFLRCRPRKASPSSRPFPATCRTLFYILRSPPTATIDAMSGYSSDRDRGRDRGFGAPRFGGSRAGPLSGKKFGNPGEKLVKKKWNLDELPKFEKNFYQEHPDLARRTAQEVETYRXSKEITVRGHNCPKPVLNFYEANFPANVMDVIARQNFTEPTAIQAQGWPXALSGLDMVGVAQTGSGKTLAXLLPGIGHINHQPFLERGDGPIXLXLGTNLGTGPTSAARNX

SEQ ID NO: 4156 - protein, 198 aa, Homo sapiens
  MISC_FEATURE (162): Xaa equals any of the twenty naturally occurring L-amino acids
  MISC_FEATURE (168): Xaa equals any of the twenty naturally occurring L-amino acids
  MISC_FEATURE (173): Xaa equals any of the twenty naturally occurring L-amino acids
  MISC_FEATURE (185): Xaa equals any of the twenty naturally occurring L-amino acids
  MISC_FEATURE (186): Xaa equals any of the twenty naturally occurring L-amino acids
  MISC_FEATURE (188): Xaa equals any of the twenty naturally occurring L-amino acids
  MISC_FEATURE (193): Xaa equals any of the twenty naturally occurring L-amino acids
YFLSKERIKETLDPIDEVAALIAATIHDVDHPGRTNSFLCNAGSELAILYNDTAVLESHHAALAFQLTTGDDKCNIFKNMERNDYRTLRQGIIDMVLATEMTKHFEHVNKFVNSINKPLATLEENGETDKNQEVINTMLRTPENRTLIKRMLIKCADVSNPXRPLQYXIEWAXRISEEYFSQTDXXEXARLTXGDASG

SEQ ID NO: 4157 - protein, 162 aa, Homo sapiens
  MISC_FEATURE (120): Xaa equals any of the twenty naturally occurring L-amino acids
  MISC_FEATURE (130): Xaa equals any of the twenty naturally occurring L-amino acids
EWEQEIRTFALLSDAAFNDSWSSFLMDVLSPLSFIKVSHVRMQGILLLVFAKYQHLPYIQILSTKSTPTGLFGYWGNKGGVNICLKLYGYYVSIINCHLPPHISTITSGWSTLTGSWRCXIVRARHPNIXDHDLIIWFGDMNFRIEDFGLHFGSGNPFKKRG

SEQ ID NO: 4158 - protein, 186 aa, Homo sapiens
  MISC_FEATURE (180): Xaa equals any of the twenty naturally occurring L-amino acids
  MISC_FEATURE (181): Xaa equals any of the twenty naturally occurring L-amino acids
  MISC_FEATURE (182): Xaa equals any of the twenty naturally occurring L-amino acids
SLATMRECISIHVGQAGVQIGNACWELYCLEHGIQPDGQMPSDKTIGGGDDSFNTFFSETGAGKHVPRAVFVDLEPTVIDEVRTGTYRQLFHPEQLITGKEDAANNYARGHYTIGKEIIDLVLDRIRKLADQCTGLQGFLVFHSFGGGTGSGFTSLLMERLSIDYGKKSKLEFSIYPAPXXXTSCS

SEQ ID NO: 4159 - protein, 261 aa, Homo sapiens
  MISC_FEATURE (1): Xaa equals any of the twenty naturally occurring L-amino acids
  MISC_FEATURE (2): Xaa equals any of the twenty naturally occurring L-amino acids
  MISC_FEATURE (3): Xaa equals any of the twenty naturally occurring L-amino acids
  MISC_FEATURE (202): Xaa equals any of the twenty naturally occurring L-amino acids
  MISC_FEATURE (213): Xaa equals any of the twenty naturally occurring L-amino acids
  MISC_FEATURE (214): Xaa equals any of the twenty naturally occurring L-amino acids
  MISC_FEATURE (228): Xaa equals any of the twenty naturally occurring L-amino acids
  MISC_FEATURE (237): Xaa equals any of the twenty naturally occurring L-amino acids
  MISC_FEATURE (239): Xaa equals any of the twenty naturally occurring L-amino acids
  MISC_FEATURE (241): Xaa equals any of the twenty naturally occurring L-amino acids
  MISC_FEATURE (247): Xaa equals any of the twenty naturally occurring L-amino acids
  MISC_FEATURE (258): Xaa equals any of the twenty naturally occurring L-amino acids
XXXPVPPRNSRVDPRVRAAMARGPKKHLKRVAAPKHWMLDKLTGVFAPRPSTGPHKLRECLPLIIFLRNRLKYALTGDEVKKICMQRFIKIDGKVRTDITYPAGFMDVISIDKTGENFRLIYDTKGRFAVHRITPEEAKYKLCKVRKIFVGTKGIPHLVTHDARTIRYPDPLIKVNDTIQIDLETGKITDFIKVDTGNLGMXTGGANLGRNGXXTNRERAPWDLFDGXHGEKKPNGXQXLXLRTFSXNFWVIGQRANXTHG

SEQ ID NO: 4160 - protein, 143 aa, Homo sapiens
  MISC_FEATURE (2): Xaa equals any of the twenty naturally occurring L-amino acids
SXTPFRYVCRYRPGIPGSTHASGARGHRVPLTEACKDSRIGGMMKTLLLFVGLLLTWESGQVLGDQTVSDNELQEMSNQGSKYVNKEIQNAVNGVKQIKTLIEKTNEERKTLLSNLEEAKKKKEDALLSVRAPELPRHVPALP

SEQ ID NO: 4161 - protein, 179 aa, Homo sapiens
  MISC_FEATURE (6): Xaa equals any of the twenty naturally occurring L-amino acids
  MISC_FEATURE (7): Xaa equals any of the twenty naturally occurring L-amino acids
  MISC_FEATURE (25): Xaa equals any of the twenty naturally occurring L-amino acids
  MISC_FEATURE (171): Xaa equals any of the twenty naturally occurring L-amino acids
LTLLWXXCPYRSGIPGSTHASGASXAFSCFKMKLNISFPATGCQKLIEVDDERKLRTFYEKRMATEVAADALGEEWKGYVVRISGGNDKQGFPMKQGVLTHGRVRLLLSKGHSCYRPRRTGERKRKSVRGCIVDANLSVLNLVIVKKGEKDIPGLTDTTVPRRLGPKRASXIRKLFNLS

SEQ ID NO: 4162 - protein, 244 aa, Homo sapiens
  MISC_FEATURE (208): Xaa equals any of the twenty naturally occurring L-amino acids
  MISC_FEATURE (237): Xaa equals any of the twenty naturally occurring L-amino acids
  MISC_FEATURE (240): Xaa equals any of the twenty naturally occurring L-amino acids
KRLVIQDKNKYNTPKYRMIVRVTNRDIICQIAYARIEGDMIVCAAYAHELPKYGVKVGLTNYAAAYCTGLLLARRLLNRFGMDKIYEGQVEVTGDEYNVESIDGQPGAFTCYLDAGLARTTTGNKVFGALKGAVDGGLSIPHSTKRFPGYDSESKEFNAEVHRKHIMGQNVADYMRYLMEEDEDAYKKQFSQYIKNSVTSDMMEEMYXKAHAAIPENPAMKRTQEEVKRRGGTVPNXPCXKKDR

SEQ ID NO: 4163 - protein, 103 aa, Homo sapiens
  MISC_FEATURE (10): Xaa equals any of the twenty naturally occurring L-amino acids
  MISC_FEATURE (100): Xaa equals any of the twenty naturally occurring L-amino acids
VMPTLRQAAXDKSWRVRYMVADKFTELQKAVGPEITKTDLVPAFQNLMKDCEAEVRAAASHKVKEFCENLSADCRENVIMSQILPCIKELVSDANQHVKXAWA

SEQ ID NO: 4164 - protein, 148 aa, Homo sapiens
  MISC_FEATURE (3): Xaa equals any of the twenty naturally occurring L-amino acids
  MISC_FEATURE (13): Xaa equals any of the twenty naturally occurring L-amino acids
GGXNGHLRHYSWXACTYRSGIPGSTHASGEIWMASTSYDYCRVPMEDGDKRCKLLLGIGILVLLIIVILGVPLIIFTIKANSEACRDGLRAVMECRNVTHLLQQELTEAQKGFQDVEAQAGTCNHTVMALMAFLDAEEGPRTKESGGA

SEQ ID NO: 4165 - protein, 113 aa, Homo sapiens
SHIMGPNDSPYQGGVFFLTIHFPTDYPFKPPKVAFTTRIYHPNINSNGSICLDILRSQWSPALTISKVLLSICSLLCDPNPDDPLVPEIARIYKTDRDKYNRISREWTQKYAM

SEQ ID NO: 4166 - protein, 109 aa, Homo sapiens
PVPGRMKFVYKEEHPFEKRRSEGEKIRKKYPDRVPVIVEKAPKARIGDLDKKKYLVPSDLTVGQFYFLIRKRIHLRAEDALFFFVNNVIPPTSATMGQLYQEHHEEDFF

SEQ ID NO: 4167 - protein, 147 aa, Homo sapiens
  MISC_FEATURE (4): Xaa equals any of the twenty naturally occurring L-amino acids
  MISC_FEATURE (134): Xaa equals any of the twenty naturally occurring L-amino acids
  MISC_FEATURE (139): Xaa equals any of the twenty naturally occurring L-amino acids
GVGXGVPGEVEMVKGQPFDVGPRYTQLQYIGEGAYGMVSSAYDHVRKTRVAIKKISPFEHQTYCQRTLREIQILLRFRHENVIGIRDILRASTLEAMRDVYIVQDLMETDLYKLLKSQQLSNDHICYFSTRSCXPQVHXLRNVLTEI

SEQ ID NO: 4168 - protein, 135 aa, Homo sapiens
  MISC_FEATURE (5): Xaa equals any of the twenty naturally occurring L-amino acids
  MISC_FEATURE (95): Xaa equals any of the twenty naturally occurring L-amino acids
  MISC_FEATURE (106): Xaa equals any of the twenty naturally occurring L-amino acids
  MISC_FEATURE (114): Xaa equals any of the twenty naturally occurring L-amino acids
  MISC_FEATURE (127): Xaa equals any of the twenty naturally occurring L-amino acids
GVGPXVPGEVEMVKGQPFDVGPRYTQLQYIGEGAYGMVSSAYDHVRKTRVAIKKISPFEHQTYCQRTLREIQILLRFRHENVIGIRDILRASTLXSHERCLHCAGXVFPLFLFXLRKLTKKCFIAKXEEKKRFQT

SEQ ID NO: 4169 - protein, 65 aa, Homo sapiens
  MISC_FEATURE (10): Xaa equals any of the twenty naturally occurring L-amino acids
  MISC_FEATURE (11): Xaa equals any of the twenty naturally occurring L-amino acids
  MISC_FEATURE (13): Xaa equals any of the twenty naturally occurring L-amino acids
  MISC_FEATURE (16): Xaa equals any of the twenty naturally occurring L-amino acids
  MISC_FEATURE (18): Xaa equals any of the twenty naturally occurring L-amino acids
  MISC_FEATURE (19): Xaa equals any of the twenty naturally occurring L-amino acids
  MISC_FEATURE (20): Xaa equals any of the twenty naturally occurring L-amino acids
  MISC_FEATURE (21): Xaa equals any of the twenty naturally occurring L-amino acids
  MISC_FEATURE (22): Xaa equals any of the twenty naturally occurring L-amino acids
  MISC_FEATURE (23): Xaa equals any of the twenty naturally occurring L-amino acids
  MISC_FEATURE (24): Xaa equals any of the twenty naturally occurring L-amino acids
IDDQLLKKKXXKXKYXIXXXXXXXTMTPRVAFAVHRITPEEAKYKFVQSEKDLCGHKRNPSSGDS

SEQ ID NO: 4170 - protein, 20 aa, Homo sapiens
ARGPKKHLKRVEAPKHWDAG

SEQ ID NO: 4171 - protein, 55 aa, Homo sapiens
  MISC_FEATURE (3): Xaa equals any of the twenty naturally occurring L-amino acids
  MISC_FEATURE (5): Xaa equals any of the twenty naturally occurring L-amino acids
  MISC_FEATURE (26): Xaa equals any of the twenty naturally occurring L-amino acids
  MISC_FEATURE (42): Xaa equals any of the twenty naturally occurring L-amino acids
VRXTXPEPEDDAEEGLGGLPSNISSXSSLLLFNTTENLYGQXAGPRGVGGRPGLA

SEQ ID NO: 4172 - protein, 89 aa, Homo sapiens; identical to SEQ ID NO: 3245

SEQ ID NO: 4173 - protein, 59 aa, Homo sapiens
  MISC_FEATURE (57): Xaa equals any of the twenty naturally occurring L-amino acids
  MISC_FEATURE (58): Xaa equals any of the twenty naturally occurring L-amino acids
  MISC_FEATURE (59): Xaa equals any of the twenty naturally occurring L-amino acids
LTYSFCTTMQRHFRDIGIAMPSLEGRRGKTLFSPFGIIVWVEVMIYLEIKSSETENXXX

SEQ ID NO: 4174 - protein, 75 aa, Homo sapiens
INRPHLSSSRFGHDLTRILDVGPRTSFPPPRHFRNPRKRPVAMATMYTARQPRVGSAGGFGCGSRVPGASLPGER

SEQ ID NO: 4175 - protein, 54 aa, Homo sapiens
  MISC_FEATURE (52): Xaa equals any of the twenty naturally occurring L-amino acids
LSLSYQRPSTSFLYWQPFSLFVLFLSTVNILEDLLGEGILKLKKKKKNSRPXRG

SEQ ID NO: 4176 - protein, 92 aa, Homo sapiens
RLPALVSLPPAVSLTPNTMPSIKLQSSDGEIFEVDVEIAKQSVTIKTMLEDLGMDDEGDDDPVPLPNVNAAILKKVIQWCTHHKDDPPPPGR

SEQ ID NO: 4177 - protein, 63 aa, Homo sapiens
  MISC_FEATURE (51): Xaa equals any of the twenty naturally occurring L-amino acids
GGLPPLTGFLPKWAIIEEFTKNNSLIIPTIIATITLLNLYFYLRLIYSTSXTLLPISNNVKIK

SEQ ID NO: 4178 - protein, 85 aa, Homo sapiens
  MISC_FEATURE (74): Xaa equals any of the twenty naturally occurring L-amino acids
  MISC_FEATURE (78): Xaa equals any of the twenty naturally occurring L-amino acids
  MISC_FEATURE (82): Xaa equals any of the twenty naturally occurring L-amino acids
RGITGKSPALRDSWNRIFTRQSKENQSLQFCRGAECPRSLVEGEVQCVLHLERKNSWEEEGANVEHYFAAKPLXCFKXLRFXHEV

SEQ ID NO: 4179 - protein, 91 aa, Homo sapiens
RPWRMLDLLPLQDSSSLHLPRVCGRPPPHPSRPPAKDPGAAYRGGAHPQLGPVFLSSRLFCSLSAPPPLSRQMSRSLGLSRPLSVPSPCRF

SEQ ID NO: 4180 - protein, 116 aa, Homo sapiens
  MISC_FEATURE (29): Xaa equals any of the twenty naturally occurring L-amino acids
  MISC_FEATURE (36): Xaa equals any of the twenty naturally occurring L-amino acids
  MISC_FEATURE (45): Xaa equals any of the twenty naturally occurring L-amino acids
  MISC_FEATURE (47): Xaa equals any of the twenty naturally occurring L-amino acids
PRVRTAARRRQKGTAARRRQKGTAARRRXKGTPARXRQKLRLREXDXRVRLREDDRRGRPSQPFWLPDLGLRLTVFCGVLHAIMSVLTPLLLRGLTGSARRLPVPRAKIHSLPPEG

SEQ ID NO: 4181 - protein, 124 aa, Homo sapiens
GKLVRLQVPVRNSRVDPRVRYPEHGDLAGFTFTSVSAAPSASSPRRRDPVARSSPCLFSRSMPGRSLDSRGNPTVEVDLFTSKGLFRAAVPSGASTGIYGGPRAPGTMDKTRYMGEGCLQRLLE

SEQ ID NO: 4182 - protein, 34 aa, Homo sapiens
  MISC_FEATURE (9): Xaa equals any of the twenty naturally occurring L-amino acids
  MISC_FEATURE (30): Xaa equals any of the twenty naturally occurring L-amino acids
MKMYVSLYXFKNQLSNNTIWFQLVGNLLIXLMQT

SEQ ID NO: 4183 - protein, 90 aa, Homo sapiens
  MISC_FEATURE (62): Xaa equals any of the twenty naturally occurring L-amino acids
  MISC_FEATURE (69): Xaa equals any of the twenty naturally occurring L-amino acids
EELILKNLVNSIINLLNFMSPFKIEEALRRHDLLTTLVKKEYEHNKRLVCQEQVGYYNSEFXIFIPFIXASWATVAQTLNLLTPACGSVA

SEQ ID NO: 4184 - protein, 154 aa, Homo sapiens
  MISC_FEATURE (119): Xaa equals any of the twenty naturally occurring L-amino acids
  MISC_FEATURE (120): Xaa equals any of the twenty naturally occurring L-amino acids
  MISC_FEATURE (149): Xaa equals any of the twenty naturally occurring L-amino acids
GRVGRQARGRSGLPGVLCAAPGDKMAARGRRAEPQGREAPGPAGGGGGGSRWAESGSGTSPESGDEEVSGAGSSPVSGGVNLFANDGSFLELFKRKMEEEQRQRQEEPPRVRSDPTSRXXPLAPGIRRGRAVRASHLASWANAEAGTNXPSRRE

SEQ ID NO: 4185 - protein, 175 aa, Homo sapiens
  MISC_FEATURE (165): Xaa equals any of the twenty naturally occurring L-amino acids
  MISC_FEATURE (171): Xaa equals any of the twenty naturally occurring L-amino acids
TTTMSSKKAKTKTTKKRPQRATSNVFAMFDQSQIQEFKEAFNMIDQNRDGFIDKEDLHDMLASLGKNPTDAYLDAMMNEAPGPINFTMFLTMFGEKLNGTDPEDVIRNAFACFDEEATGTIQEDYLRELLTTMGDRFTDEEVDELYREAPIDKKGNFNYIEFTRXLKHGAXDQDD

SEQ ID NO: 4186 - protein, 170 aa, Homo sapiens
  MISC_FEATURE (142): Xaa equals any of the twenty naturally occurring L-amino acids
  MISC_FEATURE (157): Xaa equals any of the twenty naturally occurring L-amino acids
  MISC_FEATURE (161): Xaa equals any of the twenty naturally occurring L-amino acids
  MISC_FEATURE (166): Xaa equals any of the twenty naturally occurring L-amino acids
  MISC_FEATURE (167): Xaa equals any of the twenty naturally occurring L-amino acids
CLAQNLALEGLRGHLLSDKGNGEMTVVGAAEVTQSIRPEEELLPAQDIKALFVSEEEKKLTRKEVYIKNGDKKGSCERDAQYAPGYDKVKDISEVVTPRFLCTGGVSPYADPNTCRGDSGGPLIVHKRSRFIQVGVISLGVXDVCKNQKRQKQVPAXARDXTSTSXXAAC

SEQ ID NO: 4187 - protein, 124 aa, Homo sapiens
AGARAEPAAMSGEPGQTSVAPPPEEVEPGSGVRIVVEYCEPCGFEATYLELASAVKEQYPGIEIESRLGGTGAFEIEINGQLVFSKLENGGFPYEKDLIEAIRRASNGETLEKITNSRPPCVIL

SEQ ID NO: 4188 - protein, 154 aa, Homo sapiens
  MISC_FEATURE (46): Xaa equals any of the twenty naturally occurring L-amino acids
  MISC_FEATURE (59): Xaa equals any of the twenty naturally occurring L-amino acids
  MISC_FEATURE (65): Xaa equals any of the twenty naturally occurring L-amino acids
  MISC_FEATURE (130): Xaa equals any of the twenty naturally occurring L-amino acids
VEMSVEQEILVTGIKVVDLLAPYAKGGKIGLFGGAGVGKTVLIMEXINNVAKAHGGYSXFAGVGXRTREGNDLYHEMIESGVINLKDATSKVALVYGQMNEPPGARARVALTGLTVAEYFIDQEGQYVLXFIDNIFRFTQAGSKVLHYWPNTFC

SEQ ID NO: 4189 - protein, 216 aa, Homo sapiens
  MISC_FEATURE (5): Xaa equals any of the twenty naturally occurring L-amino acids
  MISC_FEATURE (6): Xaa equals any of the twenty naturally occurring L-amino acids
  MISC_FEATURE (197): Xaa equals any of the twenty naturally occurring L-amino acids
HLGSXXTPAGTGPEFPGRPTRPGPAGRTLGQTQASCPEPRPSMDAVDATMEKLRAQCLSRGASGIQGLARFFRQLDRDGSRSLDADEFRQGLAKLGLVLDQAEAEGVCRKWDRNGSGTLDLEEFLRALRPPMSQAREAVIAAAFAKLDRSGDGVVTVDDLRGVYKWPCPPQGAQWGVDRGRSAAPFLDNFDFSEEGXARSHLAEFQGLLQRLKCLP

SEQ ID NO: 4190 - protein, 104 aa, Homo sapiens
RKSSEWHPSYRKPRKRRQAHLCVLASNCDEPMYVKLVEALCAEHQINLIKVDDNKKLGEWVGLCKIDREGKPRKVVGCNCVVIKDYGKESQAKDVIEEYFKCQK

SEQ ID NO: 4191 - protein, 252 aa, Homo sapiens
  MISC_FEATURE (5): Xaa equals any of the twenty naturally occurring L-amino acids
  MISC_FEATURE (7): Xaa equals any of the twenty naturally occurring L-amino acids
  MISC_FEATURE (9): Xaa equals any of the twenty naturally occurring L-amino acids
  MISC_FEATURE (25): Xaa equals any of the twenty naturally occurring L-amino acids
  MISC_FEATURE (27): Xaa equals any of the twenty naturally occurring L-amino acids
  MISC_FEATURE (227): Xaa equals any of the twenty naturally occurring L-amino acids
  MISC_FEATURE (231): Xaa equals any of the twenty naturally occurring L-amino acids
  MISC_FEATURE (247): Xaa equals any of the twenty naturally occurring L-amino acids
PHLGXVXRXQVPVRNSRVDPRVRPXEXEKFKQISQAYEVLSDAKKRELYDKGGEQAIKEGGAGGGFGSPMDIFDMFFGGGGRMQRERRGKNVVHQLSVTLEDLYNGATRKLALQKNVICDKCEGRGGKKGAVECCPNCRGTGMQIRIHQIGPGMVQQIQSVCMECQGHGERISPKDRCKSCNGRKIVREKKILEVHIDKGMKDGQKITFHGEGDQEPGLEPGDIIIXVDQXDHAGFTRRRRRPFHVXGHTVR

SEQ ID NO: 4192 - protein, 74 aa, Homo sapiens
  MISC_FEATURE (1): Xaa equals any of the twenty naturally occurring L-amino acids
  MISC_FEATURE (2): Xaa equals any of the twenty naturally occurring L-amino acids
  MISC_FEATURE (4): Xaa equals any of the twenty naturally occurring L-amino acids
  MISC_FEATURE (5): Xaa equals any of the twenty naturally occurring L-amino acids
XXGXXSYACRYRSGIPGSTHASAHAHTHTELSEGDGAEQEGGWVRAQVRAWKASPPILTQGLGRIGRNIQTHLH

SEQ ID NO: 4193 - protein, 203 aa, Homo sapiens
  MISC_FEATURE (1): Xaa equals any of the twenty naturally occurring L-amino acids
  MISC_FEATURE (4): Xaa equals any of the twenty naturally occurring L-amino acids
  MISC_FEATURE (6): Xaa equals any of the twenty naturally occurring L-amino acids
  MISC_FEATURE (10): Xaa equals any of the twenty naturally occurring L-amino acids
  MISC_FEATURE (25): Xaa equals any of the twenty naturally occurring L-amino acids
  MISC_FEATURE (62): Xaa equals any of the twenty naturally occurring L-amino acids
XGRXGXSQVXVRNSRVDPRVRDIPXNVDITLKGRTVIVKGPRGTLRRDFNHINVELSLLGKXKKRLRVDKWWGNRKELATVRTICSHVQNMIKGVTLGFRYKMRSVYAHFPINVVIQENGSLVEIRNFLGEKYIRRVRMRPGVACSVSQAQKDELILEGNDIELVSNSAALIQQATTVKNKDIRKFLDGIYVSEKGTVQQADE

SEQ ID NO: 4194 - protein, 119 aa, Homo sapiens
  MISC_FEATURE (6): Xaa equals any of the twenty naturally occurring L-amino acids
  MISC_FEATURE (7): Xaa equals any of the twenty naturally occurring L-amino acids
  MISC_FEATURE (113): Xaa equals any of the twenty naturally occurring L-amino acids
ADAPMXXMGVNHEKYDNSLKIISNASCTTNCLAPLAKVIHDNFGIVEGLMTTVHAITATQKTVDGPSGKLWRDGRGALQNIIPASTGAAKAVGKVIPELNGKLTGMAFRVPLXTCQWWT

SEQ ID NO: 4195 - protein, 219 aa, Homo sapiens
  MISC_FEATURE (182): Xaa equals any of the twenty naturally occurring L-amino acids
  MISC_FEATURE (214): Xaa equals any of the twenty naturally occurring L-amino acids
EAMSSKVSRDTLYEAVREVLHGNQRKRRKFLETVELQISLKNYDPQKDKRFSGTVRLKSTPRPKFSVCVLGDQQHCDEAKAVDIPHMDIEALKKLNKNKKLVKKLAKKYDAFLASESLIKQIPRILGPGLNKAGKFPSLLTHNENMVAKVDEVKSTIKFQMKKVLCLAVAVGHVKMTDDELXYNIHLAVNFLVSLLKKNWQNVRALYIKSTMGXPQRLY

SEQ ID NO: 4196 - protein, 33 aa, Homo sapiens
  MISC_FEATURE (20): Xaa equals any of the twenty naturally occurring L-amino acids
  MISC_FEATURE (21): Xaa equals any of the twenty naturally occurring L-amino acids
  MISC_FEATURE (33): Xaa equals any of the twenty naturally occurring L-amino acids
NSCGIWRYSHKDDVIKEVQXXYKDTYNKLENQX

SEQ ID NO: 4197 - protein, 123 aa, Homo sapiens
  MISC_FEATURE (9): Xaa equals any of the twenty naturally occurring L-amino acids
  MISC_FEATURE (13): Xaa equals any of the twenty naturally occurring L-amino acids
  MISC_FEATURE (18): Xaa equals any of the twenty naturally occurring L-amino acids
  MISC_FEATURE (21): Xaa equals any of the twenty naturally occurring L-amino acids
  MISC_FEATURE (24): Xaa equals any of the twenty naturally occurring L-amino acids
  MISC_FEATURE (31): Xaa equals any of the twenty naturally occurring L-amino acids
  MISC_FEATURE (40): Xaa equals any of the twenty naturally occurring L-amino acids
  MISC_FEATURE (41): Xaa equals any of the twenty naturally occurring L-amino acids
  MISC_FEATURE (49): Xaa equals any of the twenty naturally occurring L-amino acids
  MISC_FEATURE (59): Xaa equals any of the twenty naturally occurring L-amino acids
  MISC_FEATURE (71): Xaa equals any of the twenty naturally occurring L-amino acids
  MISC_FEATURE (75): Xaa equals any of the twenty naturally occurring L-amino acids
  MISC_FEATURE (98): Xaa equals any of the twenty naturally occurring L-amino acids
  MISC_FEATURE (110): Xaa equals any of the twenty naturally occurring L-amino acids
DFIWMYEDXLSGXLILAXELXRLXGNSCDCXRLLPTPYIXXFINELDSXYRLLNLKNDXLRKRYDGLKYDXKKVXEVVYDLYIRGFNKETAAACVEKXEALLAPGLADLXGCHEGVSTECLLR

SEQ ID NO: 4198 - protein, 205 aa, Homo sapiens
  MISC_FEATURE (176): Xaa equals any of the twenty naturally occurring L-amino acids
  MISC_FEATURE (187): Xaa equals any of the twenty naturally occurring L-amino acids
  MISC_FEATURE (202): Xaa equals any of the twenty naturally occurring L-amino acids
REIFTMSGALDVLQMKEEDVLKFLAAGTHLGGTNLDFQMEQYIYKRKSDGIYIINLKRTWEKLLLAARAIVAIENPADVSVISSRNTGQRAVLKFAAATGATPIAGRFTPGTFTNQIQAAFREPRLLVVTDPRADHQPLTEASYVNLPTIALCNTDSPLRYVDIAIPCNNKGAHSXGLMWWMLAREXSAHAWHHFPGNTHWXVIA

SEQ ID NO: 4199 - protein, 201 aa, Homo sapiens
  MISC_FEATURE (199): Xaa equals any of the twenty naturally occurring L-amino acids
LTETWAGSHSMRYFSTSVSWPGRGEPRFIAVGYVDDTQFVRFDSDAASPRGEPREPWVEQEGPEYWDRETQKYKRQAQADRVNLRKLRGYYNQSEDGSHTLQRMFGCDLGPDGRLLRGYNQFAYDGKDYIALNEDLRSWTAADTAAQITQRKWEAAREAEQRRAYLEGTCVEWLRRYLENGKETLQRAEHPKTHVTHHXVS

SEQ ID NO: 4200 - protein, 164 aa, Homo sapiens
  MISC_FEATURE (137): Xaa equals any of the twenty naturally occurring L-amino acids
  MISC_FEATURE (160): Xaa equals any of the twenty naturally occurring L-amino acids
CRSLSDTFGSTSLILSFAGGRNQARAATMFRNQYDNDVTVWSPQGRIHQIEYAMEAVKQGSATVGLKSKTHAVLVALKRAQSELAAHQKKILHVDNHIGISIAGLTADARLLCNFMRQECLDSRFVFDRPLPVSRLXSLIGSKTQIPTQRYGRRPYGVGXLLWV

SEQ ID NO: 4201 - protein, 166 aa, Homo sapiens
  MISC_FEATURE (57): Xaa equals any of the twenty naturally occurring L-amino acids
  MISC_FEATURE (64): Xaa equals any of the twenty naturally occurring L-amino acids
  MISC_FEATURE (67): Xaa equals any of the twenty naturally occurring L-amino acids
  MISC_FEATURE (79): Xaa equals any of the twenty naturally occurring L-amino acids
  MISC_FEATURE (80): Xaa equals any of the twenty naturally occurring L-amino acids
  MISC_FEATURE (85): Xaa equals any of the twenty naturally occurring L-amino acids
  MISC_FEATURE (89): Xaa equals any of the twenty naturally occurring L-amino acids
  MISC_FEATURE (100): Xaa equals any of the twenty naturally occurring L-amino acids
  MISC_FEATURE (109): Xaa equals any of the twenty naturally occurring L-amino acids
  MISC_FEATURE (119): Xaa equals any of the twenty naturally occurring L-amino acids
  MISC_FEATURE (121): Xaa equals any of the twenty naturally occurring L-amino acids
  MISC_FEATURE (136): Xaa equals any of the twenty naturally occurring L-amino acids
  MISC_FEATURE (141): Xaa equals any of the twenty naturally occurring L-amino acids
  MISC_FEATURE (150): Xaa equals any of the twenty naturally occurring L-amino acids
  MISC_FEATURE (151): Xaa equals any of the twenty naturally occurring L-amino acids
  MISC_FEATURE (155): Xaa equals any of the twenty naturally occurring L-amino acids
  MISC_FEATURE (160): Xaa equals any of the twenty naturally occurring L-amino acids
GDHGARVVLVAVDKGVFVLNKKNKLTQSKIWDVVEKADIGCTPGSGKDYAGVFSDAXLTFTSSXGQXTAHRAELQCPQXXARRRXSVQXTEKRMDKVGKXPKELRKCCXDGMRENPMRXSXQRRTRFISLGEACKXVFLDXCNYITELRXXARAXQSPGXGQELPG

SEQ ID NO: 4202 - protein, 183 aa, Homo sapiens
RTEIRMARMARKAGNFYVPAEPKLAFVIRIRGINGVSPKVRKVLQLLRFRQIFNGTFVKLNKASINMLRIVEPYIAWGYPNLKSVNELIYKRGYGKINKKRIALTDNALIARSLGKYGIICMEDLIHEIYTVGKRFKEANNFLWPFKLSSPRGGMKKKTTHFVEGGDAGNREDQINRLIRRMN

SEQ ID NO: 4203 - protein, 120 aa, Homo sapiens
  MISC_FEATURE (64): Xaa equals any of the twenty naturally occurring L-amino acids
  MISC_FEATURE (89): Xaa equals any of the twenty naturally occurring L-amino acids
PLPLLRQSTRHDEKWDQQRAPTSGVRFPTRLHSPSGPELFGRATRPFLPHRCLVCAQFLWDWAXSFPLERSSVVPLLTQPQISTVRPYXENGEPLLVDALLPLSCHAGLANTPFCFALQK

SEQ ID NO: 4204 - protein, 229 aa, Homo sapiens
  MISC_FEATURE (2): Xaa equals any of the twenty naturally occurring L-amino acids
  MISC_FEATURE (3): Xaa equals any of the twenty naturally occurring L-amino acids
  MISC_FEATURE (161): Xaa equals any of the twenty naturally occurring L-amino acids
  MISC_FEATURE (210): Xaa equals any of the twenty naturally occurring L-amino acids
  MISC_FEATURE (220): Xaa equals any of the twenty naturally occurring L-amino acids
  MISC_FEATURE (223): Xaa equals any of the twenty naturally occurring L-amino acids
  MISC_FEATURE (227): Xaa equals any of the twenty naturally occurring L-amino acids
TXXGALAGTGPEFPGRPTRPVQLNRPNKRNAMNKVFWREMVECFNKISRDADCRAVVISGAGKMFTAGIDLMDMASDILQPKGDDVARISWYLRDIITRYQETFNVIERCPKPVIAAVHGGCIGGGVDLVTACDIRYCAQDAFFQVKEVDVGLAADVGTLXRLPKVIGNQSLVNELAFTGRKMMADEALGSGLVSPGVPRQRGHAGCLPXRWRPENFQQXAPXAGAXTP

SEQ ID NO: 4205 - protein, 166 aa, Homo sapiens
  MISC_FEATURE (2): Xaa equals any of the twenty naturally occurring L-amino acids
  MISC_FEATURE (11): Xaa equals any of the twenty naturally occurring L-amino acids
  MISC_FEATURE (13): Xaa equals any of the twenty naturally occurring L-amino acids
  MISC_FEATURE (14): Xaa equals any of the twenty naturally occurring L-amino acids
  MISC_FEATURE (42): Xaa equals any of the twenty naturally occurring L-amino acids
  MISC_FEATURE (58): Xaa equals any of the twenty naturally occurring L-amino acids
  MISC_FEATURE (84): Xaa equals any of the twenty naturally occurring L-amino acids
  MISC_FEATURE (92): Xaa equals any of the twenty naturally occurring L-amino acids
  MISC_FEATURE (97): Xaa equals any of the twenty naturally occurring L-amino acids
  MISC_FEATURE (115): Xaa equals any of the twenty naturally occurring L-amino acids
  MISC_FEATURE (124): Xaa equals any of the twenty naturally occurring L-amino acids
  MISC_FEATURE (132): Xaa equals any of the twenty naturally occurring L-amino acids
  MISC_FEATURE (135): Xaa equals any of the twenty naturally occurring L-amino acids
  MISC_FEATURE (141): Xaa equals any of the twenty naturally occurring L-amino acids
  MISC_FEATURE (144): Xaa equals any of the twenty naturally occurring L-amino acids
  MISC_FEATURE (145): Xaa equals any of the twenty naturally occurring L-amino acids
  MISC_FEATURE (146): Xaa equals any of the twenty naturally occurring L-amino acids
  MISC_FEATURE (157): Xaa equals any of the twenty naturally occurring L-amino acids
  MISC_FEATURE (164): Xaa equals any of the twenty naturally occurring L-amino acids
HXDETVNRYKXSXXISTLNSGKKSLETEHKALTSEIALLQSXLKTEGSDLCDRVSEMXKLDAQVKELVLKSAVEAERLVAGKLXKDTYIENXKLISXKLPGAGHQDRPHPGCPVXPARILQGAXGACTLLWXADXVVVGGXAWXXXKADICKRPSRXRNQALRXAL

SEQ ID NO: 4206 - protein, 175 aa, Homo sapiens
  MISC_FEATURE (5): Xaa equals any of the twenty naturally occurring L-amino acids
  MISC_FEATURE (170): Xaa equals any of the twenty naturally occurring L-amino acids
  MISC_FEATURE (173): Xaa equals any of the twenty naturally occurring L-amino acids
  MISC_FEATURE (174): Xaa equals any of the twenty naturally occurring L-amino acids
  MISC_FEATURE (175): Xaa equals any of the twenty naturally occurring L-amino acids
ARAGXKGYHHRTEINKKIYKIGQGYLIKDGKLIKNNASTDYDLSDKSINPLGGFVHYGEVTNDFVMLKGCVVGTKKRVLTLRKSLLVQTKRRALEKIDLKFIDTTSKFGHGRFQTMEEKKAFMGPLKKDRIARKKELNARNRFCSWWGLNKSYFPLKKKKKRGGRFKGSXFTXXX

SEQ ID NO: 4207 - protein, 129 aa, Homo sapiens
AVLAPPPGDRCSRPAPFSTVTMCDRKAVIKNADMSEEMQQDSVECATQALEKYNIEKDIAAHIKKEFDKKYNPTWHCIVGRNFGSYVTHETKHFIYFYLGQVAFFCSNLVKSMDCATHPVIHPKTRTAA

SEQ ID NO: 4208 - protein, 86 aa, Homo sapiens
NKKLPKASPLPPMWHWHHSLLPWEEFFHHVIEGDGSLRTPPLRAHSCPQGLLKLGAPGNHPVELEIQRFLEARDMLLTPFPLKVLE

SEQ ID NO: 4209 - protein, 169 aa, Homo sapiens
  MISC_FEATURE (4): Xaa equals any of the twenty naturally occurring L-amino acids
  MISC_FEATURE (97): Xaa equals any of the twenty naturally occurring L-amino acids
  MISC_FEATURE (138): Xaa equals any of the twenty naturally occurring L-amino acids
  MISC_FEATURE (159): Xaa equals any of the twenty naturally occurring L-amino acids
  MISC_FEATURE (162): Xaa equals any of the twenty naturally occurring L-amino acids
  MISC_FEATURE (168): Xaa equals any of the twenty naturally occurring L-amino acids
LHIXASYSISQKLNVPMAPLSEPNAVGIVIAHGSVGDAISVMVPDVYISDDGGYSWTKMLEGPHYYTILDSGGIIVAIEHSSRPINVIKFSTDKGQXWQTYTFTRDPIYFTGLASEPGARAMNISIWGFTESFLTSQXGLLPIDFKDILERNCEKEGLXHMXWHTSTXP

SEQ ID NO: 4210 - protein, 179 aa, Homo sapiens
  MISC_FEATURE (1): Xaa equals any of the twenty naturally occurring L-amino acids
  MISC_FEATURE (2): Xaa equals any of the twenty naturally occurring L-amino acids
  MISC_FEATURE (5): Xaa equals any of the twenty naturally occurring L-amino acids
  MISC_FEATURE (10): Xaa equals any of the twenty naturally occurring L-amino acids
XXKCXSRNLXACTYRSGIPGSTHASAFPAMGVQPPNFSWVLPGRLAGLALPRLPAHYQFLLDLGVRHLVSLTERGPPHSDSCPGLTLHRLRIPDFCPPAPDQIDRFVQIVDEANARGEAVGVHCALGFGRTGTMLACYLVKERGLAAGDAIAEIRRLRPGSIETYEQEKAVFQFYQRTK

SEQ ID NO: 4211 - protein, 159 aa, Homo sapiens
  MISC_FEATURE (146): Xaa equals any of the twenty naturally occurring L-amino acids
  MISC_FEATURE (157): Xaa equals any of the twenty naturally occurring L-amino acids
ADAWADAWGSAIFFFFSEAAELVGGGGRADANMQIFVKTLTGKTITLEVEPSDTIENVKAKIQDKEGIPPDQQRLIFAGKQLEDGRTLSDYNIQKESTLHLVLRLRGGIIEPSLRQLAQKYNCDKMICRKCYARLPSCCQLPQEEXWSHQQPASKKXVK

SEQ ID NO: 4212 - protein, 70 aa, Homo sapiens
ERRQVGAAAVAMTRGNQRELARQKNMKKQSDSVKGKRRDDGLSAAARKQRDSEIMQQKQKKANEKKEEPK

SEQ ID NO: 4213 - protein, 155 aa, Homo sapiens
  MISC_FEATURE (20): Xaa equals any of the twenty naturally occurring L-amino acids
  MISC_FEATURE (23): Xaa equals any of the twenty naturally occurring L-amino acids
  MISC_FEATURE (25): Xaa equals any of the twenty naturally occurring L-amino acids
  MISC_FEATURE (49): Xaa equals any of the twenty naturally occurring L-amino acids
ETLSQSPPKGVTIPYRPKPXSSXVXFAGGQAYTIQGQYAIPQPDLTKLXQLAMQQSHFPMTHGNTGFSAGLDASAQTTSHELTIPNDLIGCIIGRQGAKINEIRQMSGAQIKIANPVEGSTDRQVTITGSAASISLAQYLINVRLSSETGGMGSS

SEQ ID NO: 4214 - protein, 127 aa, Homo sapiens
  MISC_FEATURE (6): Xaa equals any of the twenty naturally occurring L-amino acids
  MISC_FEATURE (98): Xaa equals any of the twenty naturally occurring L-amino acids
  MISC_FEATURE (101): Xaa equals any of the twenty naturally occurring L-amino acids
  MISC_FEATURE (103): Xaa equals any of the twenty naturally occurring L-amino acids
  MISC_FEATURE (111): Xaa equals any of the twenty naturally occurring L-amino acids
  MISC_FEATURE (112): Xaa equals any of the twenty naturally occurring L-amino acids
  MISC_FEATURE (116): Xaa equals any of the twenty naturally occurring L-amino acids
  MISC_FEATURE (117): Xaa equals any of the twenty naturally occurring L-amino acids
  MISC_FEATURE (118): Xaa equals any of the twenty naturally occurring L-amino acids
  MISC_FEATURE (119): Xaa equals any of the twenty naturally occurring L-amino acids
  MISC_FEATURE (120): Xaa equals any of the twenty naturally occurring L-amino acids
  MISC_FEATURE (121): Xaa equals any of the twenty naturally occurring L-amino acids
  MISC_FEATURE (123): Xaa equals any of the twenty naturally occurring L-amino acids
  MISC_FEATURE (124): Xaa equals any of the twenty naturally occurring L-amino acids
  MISC_FEATURE (125): Xaa equals any of the twenty naturally occurring L-amino acids
AEVQVXVLDGRGHLLGRLAAIVAKQVLLGRKVVVVRCEGINISGNFYRNKLKYLAFLRKRMNTNPSRGPYHFRAPSRIFWRTVRGMLPHKTKRGQAAXDRXRXLTASNRLXXGKNXXXXXXPXXXCV

SEQ ID NO: 4215 - protein, 172 aa, Homo sapiens
  MISC_FEATURE (8): Xaa equals any of the twenty naturally occurring L-amino acids
  MISC_FEATURE (12): Xaa equals any of the twenty naturally occurring L-amino acids
  MISC_FEATURE (112): Xaa equals any of the twenty naturally occurring L-amino acids
  MISC_FEATURE (123): Xaa equals any of the twenty naturally occurring L-amino acids
  MISC_FEATURE (131): Xaa equals any of the twenty naturally occurring L-amino acids
  MISC_FEATURE (137): Xaa equals any of the twenty naturally occurring L-amino acids
  MISC_FEATURE (138): Xaa equals any of the twenty naturally occurring L-amino acids
  MISC_FEATURE (143): Xaa equals any of the twenty naturally occurring L-amino acids
  MISC_FEATURE (145): Xaa equals any of the twenty naturally occurring L-amino acids
  MISC_FEATURE (146): Xaa equals any of the twenty naturally occurring L-amino acids
  MISC_FEATURE (147): Xaa equals any of the twenty naturally occurring L-amino acids
  MISC_FEATURE (148): Xaa equals any of the twenty naturally occurring L-amino acids
  MISC_FEATURE (150): Xaa equals any of the twenty naturally occurring L-amino acids
  MISC_FEATURE (152): Xaa equals any of the twenty naturally occurring L-amino acids
  MISC_FEATURE (156): Xaa equals any of the twenty naturally occurring L-amino acids
  MISC_FEATURE (157): Xaa equals any of the twenty naturally occurring L-amino acids
  MISC_FEATURE (172): Xaa equals any of the twenty naturally occurring L-amino acids
GEPRGSRXRFGXWRLQPEFKPKQLEGTMANCERTFIAIKPDGVQRGLVGEIIKRFEQKGFRLVGLKFMQASEDLLKEHYVDLKDRPFFAGLVKYMHSGPGSCMVWEGLNVVXTGRACSGDQPXNFKPGNIXETFGYXXAGTLXWXXXXGXGXKRKXXLGFHPWELGKYPAWX

SEQ ID NO: 4216 - protein, 99 aa, Homo sapiens
  MISC_FEATURE (67): Xaa equals any of the twenty naturally occurring L-amino acids
SVSGRSLLPSLRLLHRRRPLQVLVMRECISIHVGQAGVQIGNACWELYCLEHGIQPDGQMPSDKTIXGGDDSFNTFFSETGAGKHVPRASVCRLGTHSH

SEQ ID NO: 4217 - protein, 135 aa, Homo sapiens
  MISC_FEATURE (4): Xaa equals any of the twenty naturally occurring L-amino acids
  MISC_FEATURE (7): Xaa equals any of the twenty naturally occurring L-amino acids
  MISC_FEATURE (21): Xaa equals any of the twenty naturally occurring L-amino acids
  MISC_FEATURE (22): Xaa equals any of the twenty naturally occurring L-amino acids
  MISC_FEATURE (25): Xaa equals any of the twenty naturally occurring L-amino acids
  MISC_FEATURE (126): Xaa equals any of the twenty naturally occurring L-amino acids
  MISC_FEATURE (134): Xaa equals any of the twenty naturally occurring L-amino acids
RLFXRSXIPGSTHASGLTGMXXLQXICSIALVGKYTKLRDCYASVFKALEHSALAINHKLNLMYIDSIDLEKITETEDPVKFHEAWQKLCKADGILVPGGFGIRGTLGKLQAISWARTKKIPFLGXWLGKPLGXG

SEQ ID NO: 4218 - protein, 151 aa, Homo sapiens; identical to SEQ ID NO: 2501

SEQ ID NO: 4219 - protein, 70 aa, Homo sapiens
  MISC_FEATURE (30): Xaa equals any of the twenty naturally occurring L-amino acids
  MISC_FEATURE (38): Xaa equals any of the twenty naturally occurring L-amino acids
  MISC_FEATURE (50): Xaa equals any of the twenty naturally occurring L-amino acids
  MISC_FEATURE (55): Xaa equals any of the twenty naturally occurring L-amino acids
  MISC_FEATURE (61): Xaa equals any of the twenty naturally occurring L-amino acids
  MISC_FEATURE (70): Xaa equals any of the twenty naturally occurring L-amino acids
QPGKAMSCNQNAAEDGTHNETATHLPPALXLALMRSWXGACCVALMPPPXSVQRXPAQEAXAGRTLGRPX

SEQ ID NO: 4220 - protein, 151 aa, Homo sapiens
  MISC_FEATURE (5): Xaa equals any of the twenty naturally occurring L-amino acids
  MISC_FEATURE (123): Xaa equals any of the twenty naturally occurring L-amino acids
  MISC_FEATURE (148): Xaa equals any of the twenty naturally occurring L-amino acids
SAASXFASPAEPHRSDTMGKVKVGVNGFGRIGRLVTRAAFNSGKVDIVAINDPFIDLNYMVYMFQYDSTHGKFHGTVKAENGKLVINGNPITIFQERDPSKIKWGDAGAEYVVESTGVFTTMXKLGLICRGEPKGSSSLPPFADAPMXAWV

SEQ ID NO: 4221 - protein, 238 aa, Homo sapiens
  MISC_FEATURE (1): Xaa equals any of the twenty naturally occurring L-amino acids
  MISC_FEATURE (2): Xaa equals any of the twenty naturally occurring L-amino acids
  MISC_FEATURE (6): Xaa equals any of the twenty naturally occurring L-amino acids
  MISC_FEATURE (169): Xaa equals any of the twenty naturally occurring L-amino acids
  MISC_FEATURE (215): Xaa equals any of the twenty naturally occurring L-amino acids
  MISC_FEATURE (224): Xaa equals any of the twenty naturally occurring L-amino acids
  MISC_FEATURE (232): Xaa equals any of the twenty naturally occurring L-amino acids
  MISC_FEATURE (233): Xaa equals any of the twenty naturally occurring L-amino acids
XXLVKXHHRSGIPGSTHASGLGSSVLVPSRKFFVGGNWKMNGRKQSLGELIGTLNAAKVPADTEVVCAPPTAYIDFARQKLDPKIAVAAQNCYKVTNGAFTGEISPGMIKDCGATWVVLGHSERRHVFGESDELIGQKVAHALAEGLGVIACIGEKLDEREAGITEKVXFEQTKVIADNVKDWSKVVLPMNLCGPLVLARLQHPNRPRKYTRSPXGWLEVQRLXCGGSKHPXXLWRLL

SEQ ID NO: 4222 - protein, 229 aa, Homo sapiens
  MISC_FEATURE (4): Xaa equals any of the twenty naturally occurring L-amino acids
  MISC_FEATURE (5): Xaa equals any of the twenty naturally occurring L-amino acids
  MISC_FEATURE (27): Xaa equals any of the twenty naturally occurring L-amino acids
  MISC_FEATURE (32): Xaa equals any of the twenty naturally occurring L-amino acids
  MISC_FEATURE (130): Xaa equals any of the twenty naturally occurring L-amino acids
  MISC_FEATURE (135): Xaa equals any of the twenty naturally occurring L-amino acids
  MISC_FEATURE (167): Xaa equals any of the twenty naturally occurring L-amino acids
  MISC_FEATURE (195): Xaa equals any of the twenty naturally occurring L-amino acids
  MISC_FEATURE (206): Xaa equals any of the twenty naturally occurring L-amino acids
  MISC_FEATURE (215): Xaa equals any of the twenty naturally occurring L-amino acids
  MISC_FEATURE (225): Xaa equals any of the twenty naturally occurring L-amino acids
GSNXXPLNVDRHVGMAVAGLLADARSXADIAXEEASNFRSNFGYNIPLKHLADRVAMYVHAYTLYSAVRPFGCSFMLGSYSVNDGAQLYMIDPSGVSYGYWGCAIGKARQAAKTEIEKLQMKEMTCRDIXKEDAXIIYIVHDEVKDKAFELELSWVGELTNGRHEIXPKDIREEAEKYAKESLKEEDESDDDNTXHLLQHLLDFKXLLRSMELFXLDYTYWPILXNFCL

SEQ ID NO: 4223 - protein, 48 aa, Homo sapiens
  MISC_FEATURE (5): Xaa equals any of the twenty naturally occurring L-amino acids
  MISC_FEATURE (11): Xaa equals any of the twenty naturally occurring L-amino acids
  MISC_FEATURE (27): Xaa equals any of the twenty naturally occurring L-amino acids
  MISC_FEATURE (39): Xaa equals any of the twenty naturally occurring L-amino acids
  MISC_FEATURE (44): Xaa equals any of the twenty naturally occurring L-amino acids
  MISC_FEATURE (45): Xaa equals any of the twenty naturally occurring L-amino acids
  MISC_FEATURE (48): Xaa equals any of the twenty naturally occurring L-amino acids
FPTHXRPYLYXFFQAKETIGHSRKISXSLNYRQDGQQSXYLQLXXIRX

SEQ ID NO: 4224 - protein, 134 aa, Homo sapiens
  MISC_FEATURE (16): Xaa equals any of the twenty naturally occurring L-amino acids
  MISC_FEATURE (17): Xaa equals any of the twenty naturally occurring L-amino acids
  MISC_FEATURE (18): Xaa equals any of the twenty naturally occurring L-amino acids
  MISC_FEATURE (119): Xaa equals any of the twenty naturally occurring L-amino acids
  MISC_FEATURE (120): Xaa equals any of the twenty naturally occurring L-amino acids
  MISC_FEATURE (123): Xaa equals any of the twenty naturally occurring L-amino acids
  MISC_FEATURE (134): Xaa equals any of the twenty naturally occurring L-amino acids
RLQVPVRNSRVDPRVXXXVQVLVLDGRGHLLGRLAAIVAKQVLLGRKVVVVRCEGINISGNFYRNKLKYLAFLRKRMNTNPSRGPYHFRAPSRIFWRTVRGMLPHKTKRGQAALDRLKXXDGXPPPYDKKKRMX

SEQ ID NO: 4225 - protein, 40 aa, Homo sapiens
NPVSTKNTKICWAWWRVPVIPATRGAEAGGSLEPERQRLQ

SEQ ID NO: 4226 - protein, 143 aa, Homo sapiens
  MISC_FEATURE (1): Xaa equals any of the twenty naturally occurring L-amino acids
  MISC_FEATURE (4): Xaa equals any of the twenty naturally occurring L-amino acids
  MISC_FEATURE (133): Xaa equals any of the twenty naturally occurring L-amino acids
XRVXAAEMGKFMKPGKVVLVLAGRYSGRKAVIVKNIDDGTSDRPYSHALVAGIDRYPRKVTAAMGKKKIAKRSKIKSFVKVYNYNHLMPTRYSVDIPLDKTVAIRMSSEILLLNARPDGRPRSSLKRDTRQAXNKWFFQKLRF

SEQ ID NO: 4227 - protein, 174 aa, Homo sapiens
  MISC_FEATURE (7): Xaa equals any of the twenty naturally occurring L-amino acids
  MISC_FEATURE (90): Xaa equals any of the twenty naturally occurring L-amino acids
  MISC_FEATURE (160): Xaa equals any of the twenty naturally occurring L-amino acids
RGRFPGXWRRWCCGGCWPPCCTARSWWNVCQSRGLSDVRRSSRPSHCCRPSCGARTRPAACRTSRLGPWAPCAAALSDLETPSPRSYAAXSEAARGHHQVARGALAQTFNPGLCGAEAACFSFRLYSASMWRGIPALRAASNPDWNCCLRHPRIRPRQPXVREACIDKTQCEKT

SEQ ID NO: 4228 - protein, 83 aa, Homo sapiens
  MISC_FEATURE (1): Xaa equals any of the twenty naturally occurring L-amino acids
  MISC_FEATURE (4): Xaa equals any of the twenty naturally occurring L-amino acids
  MISC_FEATURE (8): Xaa equals any of the twenty naturally occurring L-amino acids
  MISC_FEATURE (11): Xaa equals any of the twenty naturally occurring L-amino acids
  MISC_FEATURE (25): Xaa equals any of the twenty naturally occurring L-amino acids
  MISC_FEATURE (36): Xaa equals any of the twenty naturally occurring L-amino acids
  MISC_FEATURE (51): Xaa equals any of the twenty naturally occurring L-amino acids
  MISC_FEATURE (53): Xaa equals any of the twenty naturally occurring L-amino acids
  MISC_FEATURE (55): Xaa equals any of the twenty naturally occurring L-amino acids
  MISC_FEATURE (68): Xaa equals any of the twenty naturally occurring L-amino acids
  MISC_FEATURE (73): Xaa equals any of the twenty naturally occurring L-amino acids
  MISC_FEATURE (79): Xaa equals any of the twenty naturally occurring L-amino acids
  MISC_FEATURE (80): Xaa equals any of the twenty naturally occurring L-amino acids
  MISC_FEATURE (83): Xaa equals any of the twenty naturally occurring L-amino acids
XASXEAVXSLXAGLPLQPEEGDGAXLMEAKSQLFLXYFTLFMNLLNDCSEXEXEXAQTGGRKRGMSRXLASLXHCTVLXXGQX

SEQ ID NO: 4229 - protein, 120 aa, Homo sapiens
  MISC_FEATURE (1): Xaa equals any of the twenty naturally occurring L-amino acids
  MISC_FEATURE (8): Xaa equals any of the twenty naturally occurring L-amino acids
  MISC_FEATURE (16): Xaa equals any of the twenty naturally occurring L-amino acids
  MISC_FEATURE (18): Xaa equals any of the twenty naturally occurring L-amino acids
  MISC_FEATURE (36): Xaa equals any of the twenty naturally occurring L-amino acids
  MISC_FEATURE (88): Xaa equals any of the twenty naturally occurring L-amino acids
  MISC_FEATURE (90): Xaa equals any of the twenty naturally occurring L-amino acids
  MISC_FEATURE (91): Xaa equals any of the twenty naturally occurring L-amino acids
  MISC_FEATURE (96): Xaa equals any of the twenty naturally occurring L-amino acids
  MISC_FEATURE (100): Xaa equals any of the twenty naturally occurring L-amino acids
  MISC_FEATURE (104): Xaa equals any of the twenty naturally occurring L-amino acids
  MISC_FEATURE (107): Xaa equals any of the twenty naturally occurring L-amino acids
  MISC_FEATURE (109): Xaa equals any of the twenty naturally occurring L-amino acids
  MISC_FEATURE (112): Xaa equals any of the twenty naturally occurring L-amino acids
  MISC_FEATURE (116): Xaa equals any of the twenty naturally occurring L-amino acids
  MISC_FEATURE (117): Xaa equals any of the twenty naturally occurring L-amino acids
  MISC_FEATURE (118): Xaa equals any of the twenty naturally occurring L-amino acids
  MISC_FEATURE (119): Xaa equals any of the twenty naturally occurring L-amino acids
XTARNSRXDPRVRAEXQXLLLDGRGHLLGRLAAIVXKQVLLGRKVVVVRCEGINISGNFYRNKLKYLAFLRKRMNTNPSRGPYHFRPXGXXFGGPXQRNXGPTXTKXGXGPXLEPXXXXV

SEQ ID NO: 4230 - protein, 99 aa, Homo sapiens
  MISC_FEATURE (73): Xaa equals any of the twenty naturally occurring L-amino acids
  MISC_FEATURE (77): Xaa equals any of the twenty naturally occurring L-amino acids
  MISC_FEATURE (78): Xaa equals any of the twenty naturally occurring L-amino acids
  MISC_FEATURE (79): Xaa equals any of the twenty naturally occurring L-amino acids
  MISC_FEATURE (85): Xaa equals any of the twenty naturally occurring L-amino acids
  MISC_FEATURE (86): Xaa equals any of the twenty naturally occurring L-amino acids
  MISC_FEATURE (89): Xaa equals any of the twenty naturally occurring L-amino acids
  MISC_FEATURE (91): Xaa equals any of the twenty naturally occurring L-amino acids
  MISC_FEATURE (93): Xaa equals any of the twenty naturally occurring L-amino acids
  MISC_FEATURE (97): Xaa equals any of the twenty naturally occurring L-amino acids
  MISC_FEATURE (98): Xaa equals any of the twenty naturally occurring L-amino acids
KLPLKAKMGKEKTHINIVVIGHVDSGKSTTTGHLIYKCGGIDKRTIEKFEKEAAEMGKGSFKYAWVLDKLKAXPGTXXXTLGNLXXWKXLXTXQGTXXN

SEQ ID NO: 4231 - protein, 149 aa, Homo sapiens
  MISC_FEATURE (5): Xaa equals any of the twenty naturally occurring L-amino acids
  MISC_FEATURE (8): Xaa equals any of the twenty naturally occurring L-amino acids
  MISC_FEATURE (11): Xaa equals any of the twenty naturally occurring L-amino acids
  MISC_FEATURE (25): Xaa equals any of the twenty naturally occurring L-amino acids
  MISC_FEATURE (28): Xaa equals any of the twenty naturally occurring L-amino acids
  MISC_FEATURE (106): Xaa equals any of the twenty naturally occurring L-amino acids
  MISC_FEATURE (119): Xaa equals any of the twenty naturally occurring L-amino acids
RLLGXRSXVPXRNSRVDPRVRAEVXVLXLDGRGHLLGRLAAIVAKQVLLGRKVVVVRCEGINISGNFYRNKLKYLAFLRKRMNTNPSRGPYHFRAPSRIFWRTVPXMLAQQNQRRPRPXWTVSRCLTASHRLRQEKADGGSCCPQGPCV

SEQ ID NO: 4232 - protein, 99 aa, Homo sapiens
  MISC_FEATURE (1): Xaa equals any of the twenty naturally occurring L-amino acids
  MISC_FEATURE (6): Xaa equals any of the twenty naturally occurring L-amino acids
  MISC_FEATURE (13): Xaa equals any of the twenty naturally occurring L-amino acids
  MISC_FEATURE (28): Xaa equals any of the twenty naturally occurring L-amino acids
  MISC_FEATURE (34): Xaa equals any of the twenty naturally occurring L-amino acids
  MISC_FEATURE (36): Xaa equals any of the twenty naturally occurring L-amino acids
  MISC_FEATURE (37): Xaa equals any of the twenty naturally occurring L-amino acids
  MISC_FEATURE (51): Xaa equals any of the twenty naturally occurring L-amino acids
  MISC_FEATURE (65): Xaa equals any of the twenty naturally occurring L-amino acids
  MISC_FEATURE (66): Xaa equals any of the twenty naturally occurring L-amino acids
  MISC_FEATURE (67): Xaa equals any of the twenty naturally occurring L-amino acids
  MISC_FEATURE (79): Xaa equals any of the twenty naturally occurring L-amino acids
  MISC_FEATURE (81): Xaa equals any of the twenty naturally occurring L-amino acids
  MISC_FEATURE (86): Xaa equals any of the twenty naturally occurring L-amino acids
  MISC_FEATURE (96): Xaa equals any of the twenty naturally occurring L-amino acids
XQNWLXWFERLVXLVTMMPDQGELPIAXALANGXPXXQWEELARDLPTLVXLAIYSTNCSAPWFXXXYELVDSMQTLFXGXSLASXNNDILVSREXGGN

SEQ ID NO: 4233 - protein, 222 aa, Homo sapiens
  MISC_FEATURE (2): Xaa equals any of the twenty naturally occurring L-amino acids
  MISC_FEATURE (222): Xaa equals any of the twenty naturally occurring L-amino acids
GXLVRLQVPVRNSRVDPRVRAEVQVLVLDGRGHLLGRLAAIVAKQVLLGRKVVVVRCEGINISGNFYRNKLKYLAFLRKRMNTNPSRGPYHFRAPSRIFWRTVRGMLPHKTKRGQAALDRLKVFDGIPPPYDKKKRMVVPAALKVVRLKPTRKFAYLGRLAHEVGWKYQAVTGTLEEKRKEKAKIHYRKKKQLMRLRKQAEKNVEKKIDKYTEVLKTHGLLX

SEQ ID NO: 4234 - protein, 52 aa, Homo sapiens
  MISC_FEATURE (4): Xaa equals any of the twenty naturally occurring L-amino acids
  MISC_FEATURE (9): Xaa equals any of the twenty naturally occurring L-amino acids
  MISC_FEATURE (10): Xaa equals any of the twenty naturally occurring L-amino acids
  MISC_FEATURE (22): Xaa equals any of the twenty naturally occurring L-amino acids
  MISC_FEATURE (39): Xaa equals any of the twenty naturally occurring L-amino acids
  MISC_FEATURE (42): Xaa equals any of the twenty naturally occurring L-amino acids
  MISC_FEATURE (44): Xaa equals any of the twenty naturally occurring L-amino acids
  MISC_FEATURE (51): Xaa equals any of the twenty naturally occurring L-amino acids
LSFXKSLRXXMSRDTAVQIPGXDQHVRNFCRVRHPQHVXNCXSXAPCICSXK

SEQ ID NO: 4235 - protein, 89 aa, Homo sapiens
  MISC_FEATURE (74): Xaa equals any of the twenty naturally occurring L-amino acids
NLIFLQVSDGIIAPGYEEEALTILSKKKNGNYCVLQMDQSYKPDENEVRTLFGLHLSQKRNNGVVDKSLFSNAXTKNKDLPESASETSS

SEQ ID NO: 4236 - protein, 105 aa, Homo sapiens
  MISC_FEATURE (2): Xaa equals any of the twenty naturally occurring L-amino acids
  MISC_FEATURE (10): Xaa equals any of the twenty naturally occurring L-amino acids
  MISC_FEATURE (11): Xaa equals any of the twenty naturally occurring L-amino acids
  MISC_FEATURE (19): Xaa equals any of the twenty naturally occurring L-amino acids
  MISC_FEATURE (31): Xaa equals any of the twenty naturally occurring L-amino acids
  MISC_FEATURE (44): Xaa equals any of the twenty naturally occurring L-amino acids
  MISC_FEATURE (45): Xaa equals any of the twenty naturally occurring L-amino acids
  MISC_FEATURE (48): Xaa equals any of the twenty naturally occurring L-amino acids
  MISC_FEATURE (54): Xaa equals any of the twenty naturally occurring L-amino acids
  MISC_FEATURE (63): Xaa equals any of the twenty naturally occurring L-amino acids
  MISC_FEATURE (75): Xaa equals any of the twenty naturally occurring L-amino acids
  MISC_FEATURE (79): Xaa equals any of the twenty naturally occurring L-amino acids
  MISC_FEATURE (91): Xaa equals any of the twenty naturally occurring L-amino acids
  MISC_FEATURE (92): Xaa equals any of the twenty naturally occurring L-amino acids
  MISC_FEATURE (94): Xaa equals any of the twenty naturally occurring L-amino acids
  MISC_FEATURE (98): Xaa equals any of the twenty naturally occurring L-amino acids
  MISC_FEATURE (99): Xaa equals any of the twenty naturally occurring L-amino acids
  MISC_FEATURE (102): Xaa equals any of the twenty naturally occurring L-amino acids
  MISC_FEATURE (104): Xaa equals any of the twenty naturally occurring L-amino acids
RXLGEDGAAXXAGRPAAQXAAGGTDCHESRXILRATQLTAFALXXAQXRGQDAXRRLQDLAVXPVGSLCRRAERXIDAXTQELRRGLRGRXXPXPGSXXDPXAXI

SEQ ID NO: 4237 - protein, 143 aa, Homo sapiens
PDRRWSSLDTMNHTVQTFFSPVNSGQPPNYEMLKEEHEVAVLGAPHNPAPPTSTVIHIRSETSVPDHVVWSLFNTLFMNPCCLGFIAFAYSVKSRDRKMVGDVTGAQAYASTAKCLNIWALILGILMTILLIVIPVLIFQAYG

SEQ ID NO: 4238 - protein, 117 aa, Homo sapiens
  MISC_FEATURE (4): Xaa equals any of the twenty naturally occurring L-amino acids
GKLXSEILMQNWDAAMEDLTRLKETIDNNSVSSPLQSLQQRTWLIHWSLFVFFNHPKGRDNIIDLFLYQPQYLNAIQTMCPHILRYLTTAVITNKDVRKRRQVLKDLGKVFNRSLHI

SEQ ID NO: 4239 - protein, 226 aa, Homo sapiens
HLTRLGLEFFDQPAVPLARAFLGQVLVRRLPNGTELRGRIVETEAYLGPEDEAAHSRGGRQTPRNRGMFMKPGTLYVYIIYGMYFCMNISSQGDGACVLLRALEPLEGLETMRQLRSTLRKGTASRVLKDRELCSGPSKLCQALAINKSFDQRDLAQDEAVWLERGPLEPSEPAVVAAARVGVGHAGEWARKPLRFYVRGRPWVSVVDRVADRTHRPEQRAGQTDF

SEQ ID NO: 4240 - protein, 51 aa, Homo sapiens
  MISC_FEATURE (4): Xaa equals any of the twenty naturally occurring L-amino acids
  MISC_FEATURE (7): Xaa equals any of the twenty naturally occurring L-amino acids
  MISC_FEATURE (12): Xaa equals any of the twenty naturally occurring L-amino acids
  MISC_FEATURE (21): Xaa equals any of the twenty naturally occurring L-amino acids
  MISC_FEATURE (47): Xaa equals any of the twenty naturally occurring L-amino acids
PLPXPGXDTKNXVAACCQGFXPAHRVEWERMAAENNYKTTLRADSTXLLPL

SEQ ID NO: 4241 - protein, 182 aa, Homo sapiens
  MISC_FEATURE (6): Xaa equals any of the twenty naturally occurring L-amino acids
  MISC_FEATURE (66): Xaa equals any of the twenty naturally occurring L-amino acids
  MISC_FEATURE (116): Xaa equals any of the twenty naturally occurring L-amino acids
  MISC_FEATURE (120): Xaa equals any of the twenty naturally occurring L-amino acids
  MISC_FEATURE (121): Xaa equals any of the twenty naturally occurring L-amino acids
  MISC_FEATURE (134): Xaa equals any of the twenty naturally occurring L-amino acids
  MISC_FEATURE (150): Xaa equals any of the twenty naturally occurring L-amino acids
  MISC_FEATURE (156): Xaa equals any of the twenty naturally occurring L-amino acids
EGQVRXHLTGAAASRTSCRAQTNTWCAKSSTPTATKKRTCSSVIAELLQSERSSSTPRRLLRQPPXVKLICRPRFKSPADSGVLAARGEAGGSGVTTDQGAGLRQRVWPTTYKVTXTLTXXESDWLSQSHVHLXRGYRGLTFSIMRPHVXPDQDTXIPVFASPILCSIFLTKSTKLTCLAQT

SEQ ID NO: 4242 - protein, 61 aa, Homo sapiens
  MISC_FEATURE (19): Xaa equals any of the twenty naturally occurring L-amino acids
SDIVASMTPSLTSLHGYMXNMIHPWQIHGTVKAENGKLASMEIHHHLPGARSSKSSGAMLR

SEQ ID NO: 4243 - protein, 56 aa, Homo sapiens
  MISC_FEATURE (20): Xaa equals any of the twenty naturally occurring L-amino acids
LRIIFKKKSGLGRKQNFILXSFKFQTYYFDRYFDNNDLENLTSFHHWFCMNIIQIS

SEQ ID NO: 4244 - protein, 84 aa, Homo sapiens
  MISC_FEATURE (59): Xaa equals any of the twenty naturally occurring L-amino acids
  MISC_FEATURE (79): Xaa equals any of the twenty naturally occurring L-amino acids
RRSFSMASASCSPGGALASSEPGRKILPRMISHSELRKLFYFTHAVCFDVDSTVISEEXIGCFHWLWRKCDQATSQGSXQMVYH

SEQ ID NO: 4245 - protein, 75 aa, Homo sapiens
  MISC_FEATURE (37): Xaa equals any of the twenty naturally occurring L-amino acids
  MISC_FEATURE (67): Xaa equals any of the twenty naturally occurring L-amino acids
SQKTPHPQDVNLSSLKANTWIHWVKKDDEEEDPMDQXDLPLWLCCLPLCSAGVHGPAPGLAAMPATXAGVQGLHE

SEQ ID NO: 4246 - protein, 81 aa, Homo sapiens
  MISC_FEATURE (5): Xaa equals any of the twenty naturally occurring L-amino acids
  MISC_FEATURE (19): Xaa equals any of the twenty naturally occurring L-amino acids
  MISC_FEATURE (22): Xaa equals any of the twenty naturally occurring L-amino acids
  MISC_FEATURE (38): Xaa equals any of the twenty naturally occurring L-amino acids
  MISC_FEATURE (58): Xaa equals any of the twenty naturally occurring L-amino acids
  MISC_FEATURE (73): Xaa equals any of the twenty naturally occurring L-amino acids
  MISC_FEATURE (75): Xaa equals any of the twenty naturally occurring L-amino acids
  MISC_FEATURE (76): Xaa equals any of the twenty naturally occurring L-amino acids
  MISC_FEATURE (77): Xaa equals any of the twenty naturally occurring L-amino acids
ITPAXTGPEFPGRPTRPLXDPXDLQCKRGEHVALANWXNHASLRLLNLVYDVTPPELXDLVITELGMIPCSSXPXXXRVKS

SEQ ID NO: 4247 - protein, 102 aa, Homo sapiens
  MISC_FEATURE (5): Xaa equals any of the twenty naturally occurring L-amino acids
  MISC_FEATURE (98): Xaa equals any of the twenty naturally occurring L-amino acids
AEWLXQRRLAEKKKGRSAINEVVTREYTINIHKRIHGVGFKKRAPRALKEIRKFAMKEMGTPDVRIDTRLNKAVWAKGIRNVPYRIRVRLSRKRNEDXDSPK

SEQ ID NO: 4248 - protein, 175 aa, Homo sapiens
GRVGGSPGQSVTISCTGTTTDVGSSNYVFWYQQHPGKAPRLIIYDVTKRPSGVPDRFSGSRSGNTASLTISGLQAEDEADYHCSSYAGSYFLLFGGGTQLTVLGQPKAAPSVTLFSPSSEELQANKATLVCLISDFYPGAVTVAWKADSSPVKAGVETTTPFKQSNNKYAGQQAI

SEQ ID NO: 4249 - protein, 109 aa, Homo sapiens
HVRRHWLGTFGLIYVLGCVVGPRVGAAGGRDGGDSGVVSGRYNEELSYRRSFAYRPIRIQLGPLWDFARRVRRSDTRLSLVSSQVNSRFYRHLRGALRTRQREYHDLEI

SEQ ID NO: 4250 - protein, 95 aa, Homo sapiens
  MISC_FEATURE (8): Xaa equals any of the twenty naturally occurring L-amino acids
  MISC_FEATURE (26): Xaa equals any of the twenty naturally occurring L-amino acids
  MISC_FEATURE (34): Xaa equals any of the twenty naturally occurring L-amino acids
  MISC_FEATURE (60): Xaa equals any of the twenty naturally occurring L-amino acids
  MISC_FEATURE (68): Xaa equals any of the twenty naturally occurring L-amino acids
  MISC_FEATURE (93): Xaa equals any of the twenty naturally occurring L-amino acids
RTRFTPTXRTVRTGFIENRKTFKPRXSGHPNACXWSSQPSVVSFLKQGRGSLNQEECLCXQVTCTAWXLLEKIRWSPTWLKKYVSKNGLRHSXNL

SEQ ID NO: 4251 - protein, 64 aa, Homo sapiens
  MISC_FEATURE (21): Xaa equals any of the twenty naturally occurring L-amino acids
  MISC_FEATURE (45): Xaa equals any of the twenty naturally occurring L-amino acids
  MISC_FEATURE (51): Xaa equals any of the twenty naturally occurring L-amino acids
  MISC_FEATURE (57): Xaa equals any of the twenty naturally occurring L-amino acids
  MISC_FEATURE (61): Xaa equals any of the twenty naturally occurring L-amino acids
  MISC_FEATURE (63): Xaa equals any of the twenty naturally occurring L-amino acids
FCQIHTCHYELSDSSCEETLXACVCYVCSLSLPWPWQGCWKGSLXRPLVPXTHSFSXTGFXFXA

SEQ ID NO: 4252 - protein, 260 aa, Homo sapiens
  MISC_FEATURE (208): Xaa equals any of the twenty naturally occurring L-amino acids
  MISC_FEATURE (233): Xaa equals any of the twenty naturally occurring L-amino acids
KNKRLTKGGKKGAKKKVVDPFSKKDWYDVKAPAMFNIRNIGKTLVTRTQGTKIASDGLKGRVFEVSLADLQNDEVAFRKFKLITEDVQGKNCLTNFHGMDLTRDKMCSMVKKWQTMIEAHVDVKTTDGYLLRLFCVGFTKKRNNQIRKTSYAQHQQVRQIRKKMMEIMTREVQTNDLKEVVNKLIPDSIGKDIEKACQSIYPLHDVFXRKVKMLKKPKFELGKLMELYGEGSXSGKALGTRQVLKVERLMDMNHQSQETG

SEQ ID NO: 4253 - protein, 71 aa, Homo sapiens
  MISC_FEATURE (4): Xaa equals any of the twenty naturally occurring L-amino acids
  MISC_FEATURE (11): Xaa equals any of the twenty naturally occurring L-amino acids
  MISC_FEATURE (12): Xaa equals any of the twenty naturally occurring L-amino acids
  MISC_FEATURE (22): Xaa equals any of the twenty naturally occurring L-amino acids
  MISC_FEATURE (27): Xaa equals any of the twenty naturally occurring L-amino acids
  MISC_FEATURE (29): Xaa equals any of the twenty naturally occurring L-amino acids
  MISC_FEATURE (35): Xaa equals any of the twenty naturally occurring L-amino acids
  MISC_FEATURE (36): Xaa equals any of the twenty naturally occurring L-amino acids
  MISC_FEATURE (41): Xaa equals any of the twenty naturally occurring L-amino acids
  MISC_FEATURE (46): Xaa equals any of the twenty naturally occurring L-amino acids
  MISC_FEATURE (47): Xaa equals any of the twenty naturally occurring L-amino acids
  MISC_FEATURE (48): Xaa equals any of the twenty naturally occurring L-amino acids
  MISC_FEATURE (51): Xaa equals any of the twenty naturally occurring L-amino acids
  MISC_FEATURE (53): Xaa equals any of the twenty naturally occurring L-amino acids
  MISC_FEATURE (54): Xaa equals any of the twenty naturally occurring L-amino acids
  MISC_FEATURE (61): Xaa equals any of the twenty naturally occurring L-amino acids
  MISC_FEATURE (63): Xaa equals any of the twenty naturally occurring L-amino acids
  MISC_FEATURE (64): Xaa equals any of the twenty naturally occurring L-amino acids
  MISC_FEATURE (68): Xaa equals any of the twenty naturally occurring L-amino acids
DSMXTTGRTIXXYSLTSNFFEXIFKCXVXPLFLDXXGHFQXPGTSXXXVWXGXXQFERPRXNXXSLVXGPK

SEQ ID NO: 4254 - protein, 124 aa, Homo sapiens
  MISC_FEATURE (6): Xaa equals any of the twenty naturally occurring L-amino acids
  MISC_FEATURE (19): Xaa equals any of the twenty naturally occurring L-amino acids
RTRGLXAVIAEAEERGELXLKDARAKQEELEAALQRAKQDMARQLSEYQELMSVKLALDIEIATYRKLLEGEESRLAGDGVGAVNISVMNSTGGSSSGGGIGLTLGGTMGSNALSFSSSAGTGS

SEQ ID NO: 4255 - protein, 104 aa, Homo sapiens
  MISC_FEATURE (89): Xaa equals any of the twenty naturally occurring L-amino acids
  MISC_FEATURE (102): Xaa equals any of the twenty naturally occurring L-amino acids
DHPAEELGQSICICHPRTLTMKTLLLLAVIMIFGLLQAHGNLVNFHRMIKLTTGKEAALSYGFYGCHCGVGGRGSPKDATDRCCVTHDXCYKRLEKRGLWHXIF

SEQ ID NO: 4256 - protein, 77 aa, Homo sapiens
RGPPAHRGQCHPQMTRALHHPTQTMRICNRGGKKNQNFQGPAFFLKSTLKRKFVCIFYLHFIFLYILLGSAIFNDLG

SEQ ID NO: 4257 - protein, 137 aa, Homo sapiens
  MISC_FEATURE (1): Xaa equals any of the twenty naturally occurring L-amino acids
  MISC_FEATURE (2): Xaa equals any of the twenty naturally occurring L-amino acids
  MISC_FEATURE (13): Xaa equals any of the twenty naturally occurring L-amino acids
XXMGRVRTKTVKXAARVIIEKYYTRLGNDFHTNKRVCEEIAIIPSKKLRNKIAGYVTHLMKRIQRGPVRGISIKLQEEERERRDNYVPEVSALDQEIIEVDPDTKEMLKLLDFGSLSNLQVTQPTVGMNFKTPRGPV

SEQ ID NO: 4258 - protein, 108 aa, Homo sapiens
  MISC_FEATURE (98): Xaa equals any of the twenty naturally occurring L-amino acids
  MISC_FEATURE (101): Xaa equals any of the twenty naturally occurring L-amino acids
AKMAEVQVLVLDGRGHLLGRLAAIVAKQVLLGRKVVVVRCEGINISGNFYRNKLKYLAFLRKRMNTNPSRGPYHFRAPSRIFWRTVRGMLPHKTKARXRPXLNRLKGV

SEQ ID NO: 4259 - protein, 145 aa, Homo sapiens
  MISC_FEATURE (3): Xaa equals any of the twenty naturally occurring L-amino acids
ASXSSLEKSYELPDGQVITIGNERFRCPEALFQPSFLGMESCGIHETTFNSIMKCDVDIRKDLYANTVLSGGTTMYPGIADRMQKEITALAPSTMKIKIIAPPERKYSVWIGGSILASLSTFQQMWISKQEYDESGPSIVHRKCF

SEQ ID NO: 4260 - protein, 78 aa, Homo sapiens
VSELLETLAQLREDRQVRVLLFRSGVKGVFCAGADLKEREQMSEAEVGVFVQRLRGLMNDIGEDLGVGWRRGFGGPCR

SEQ ID NO: 4261 - protein, 55 aa, Homo sapiens
VSGLCLMFLFCFFTAFKDRETYESLIIIIIIYKMTLIGLFSNSEIFSYSISIHFL

SEQ ID NO: 4262 - protein, 63 aa, Homo sapiens
  MISC_FEATURE (4): Xaa equals any of the twenty naturally occurring L-amino acids
  MISC_FEATURE (10): Xaa equals any of the twenty naturally occurring L-amino acids
  MISC_FEATURE (32): Xaa equals any of the twenty naturally occurring L-amino acids
  MISC_FEATURE (37): Xaa equals any of the twenty naturally occurring L-amino acids
  MISC_FEATURE (40): Xaa equals any of the twenty naturally occurring L-amino acids
  MISC_FEATURE (46): Xaa equals any of the twenty naturally occurring L-amino acids
ADMXLLDDNXASIVTGVEEGRLIFDNLKKSIXYTLTXNIXEITPFXIFIIANIPLPLGTVTIL

SEQ ID NO: 4263 - protein, 197 aa, Homo sapiens
  MISC_FEATURE (2): Xaa equals any of the twenty naturally occurring L-amino acids
  MISC_FEATURE (4): Xaa equals any of the twenty naturally occurring L-amino acids
  MISC_FEATURE (153): Xaa equals any of the twenty naturally occurring L-amino acids
  MISC_FEATURE (189): Xaa equals any of the twenty naturally occurring L-amino acids
GXPXRSQPLTMDWTWSILFLVAAATGAHSQVQLVQSGAEVKKPGASVKVSCKASGYSFVNYGISWVRQAPGQGLEWMGWISTVGDTNFAQRLQGRVTMTRDASTSTAYMELRSLRSDDTAVYYCARYDYYGSGTDSGFDYWGQGALVTVSSAXTKGPSVFPLAPCFRSTFESTAALGCLAKDYFPEPGXGVRGTQAL

SEQ ID NO: 4264 - protein, 143 aa, Homo sapiens
  MISC_FEATURE (113): Xaa equals any of the twenty naturally occurring L-amino acids
  MISC_FEATURE (125): Xaa equals any of the twenty naturally occurring L-amino acids
  MISC_FEATURE (138): Xaa equals any of the twenty naturally occurring L-amino acids
  MISC_FEATURE (141): Xaa equals any of the twenty naturally occurring L-amino acids
GPASQGAPHRPAPRVGSHPAHRALPHGSDHTKVRAGRGFSLEELRVAGIHKKVARTIGISVDPRRRNKSTESLQANVQRLKEYRSKLILFPRKPSAPKKGDSSAEELKLAPSXPDRSCPSGTSIXRRKLESSLRKRRXSKXFA

SEQ ID NO: 4265 - protein, 137 aa, Homo sapiens
  MISC_FEATURE (4): Xaa equals any of the twenty naturally occurring L-amino acids
ANMXRVRTKTVKKAARVIIEKYYTRLGNDFHTNKRVCEEIAIIPSKKLRNKIAGYVTHLMKRIQRGPVRGISIKLQEEERERRDNYVPEVSALDQEIIEVDPDTKEMLKLLDFGSLSNLQVTQPTVGMNFKTPRGPV

SEQ ID NO: 4266 - protein, 211 aa, Homo sapiens
  MISC_FEATURE (5): Xaa equals any of the twenty naturally occurring L-amino acids
AVNAXQVPVRNSRVDPRVRSGAYGDIVMTQSPDSLAVSLGERATINCKSSQSVLYSFDNKNYLAWYQQKPGHPPKLLIYWASTRESGVPDRYGGSGSGTDFTLTISSLQAEDVAVYYCQQYYNTPRTFGQGTKVEIKRTVAAPSVFIFPPSDEQLKSGTASVVCLLNNFYPREAKVQWKVDNALQSGNSQESVTEQDSKDRTYSLSKHPDA

SEQ ID NO: 4267 - protein, 214 aa, Homo sapiens
  MISC_FEATURE (117): Xaa equals any of the twenty naturally occurring L-amino acids
  MISC_FEATURE (120): Xaa equals any of the twenty naturally occurring L-amino acids
  MISC_FEATURE (154): Xaa equals any of the twenty naturally occurring L-amino acids
  MISC_FEATURE (158): Xaa equals any of the twenty naturally occurring L-amino acids
  MISC_FEATURE (172): Xaa equals any of the twenty naturally occurring L-amino acids
  MISC_FEATURE (178): Xaa equals any of the twenty naturally occurring L-amino acids
  MISC_FEATURE (181): Xaa equals any of the twenty naturally occurring L-amino acids
  MISC_FEATURE (187): Xaa equals any of the twenty naturally occurring L-amino acids
  MISC_FEATURE (188): Xaa equals any of the twenty naturally occurring L-amino acids
  MISC_FEATURE (194): Xaa equals any of the twenty naturally occurring L-amino acids
  MISC_FEATURE (199): Xaa equals any of the twenty naturally occurring L-amino acids
  MISC_FEATURE (204): Xaa equals any of the twenty naturally occurring L-amino acids
LAFMSVPTMAWMMLLLGLLAYGSGVHSQTVVTQEPSFSVSPGGTVTLTCGLTSGSVSTTYYPSWYQQTPGQAPRTLIYSTNSRPSGVPDRFSGSILGNKAALTITGAQADDESDYYXVLXMGSGIWVVGGRTQLDRPKSSPRLPLRQFCSRLPXRKLXANKGHTGGGSKGDXYPGSPXQVXLERQDXXPRQGRXWKTTXPFKQXNQQGPRPGTY

SEQ ID NO: 4268 - protein, 128 aa, Homo sapiens
  MISC_FEATURE (2): Xaa equals any of the twenty naturally occurring L-amino acids
  MISC_FEATURE (114): Xaa equals any of the twenty naturally occurring L-amino acids
  MISC_FEATURE (119): Xaa equals any of the twenty naturally occurring L-amino acids
SXTEHRGLTMEFWLSWVFLVAISKGVQCEVQLVETGGGLIQPGGSLRLSCAASGFTVSSNYMSWVRQAPGKGLEWVSVIYSGGSTYYADSVKGRFTISRDNSKNTLYLQMNRLXPRTRXGITGPRLIL

SEQ ID NO: 4269 - protein, 135 aa, Homo sapiens
  MISC_FEATURE (1): Xaa equals any of the twenty naturally occurring L-amino acids
  MISC_FEATURE (4): Xaa equals any of the twenty naturally occurring L-amino acids
  MISC_FEATURE (12): Xaa equals any of the twenty naturally occurring L-amino acids
  MISC_FEATURE (25): Xaa equals any of the twenty naturally occurring L-amino acids
  MISC_FEATURE (44): Xaa equals any of the twenty naturally occurring L-amino acids
  MISC_FEATURE (49): Xaa equals any of the twenty naturally occurring L-amino acids
  MISC_FEATURE (65): Xaa equals any of the twenty naturally occurring L-amino acids
  MISC_FEATURE (68): Xaa equals any of the twenty naturally occurring L-amino acids
  MISC_FEATURE (70): Xaa equals any of the twenty naturally occurring L-amino acids
  MISC_FEATURE (71): Xaa equals any of the twenty naturally occurring L-amino acids
  MISC_FEATURE (79): Xaa equals any of the twenty naturally occurring L-amino acids
  MISC_FEATURE (87): Xaa equals any of the twenty naturally occurring L-amino acids
  MISC_FEATURE (95): Xaa equals any of the twenty naturally occurring L-amino acids
  MISC_FEATURE (97): Xaa equals any of the twenty naturally occurring L-amino acids
  MISC_FEATURE (100): Xaa equals any of the twenty naturally occurring L-amino acids
  MISC_FEATURE (101): Xaa equals any of the twenty naturally occurring L-amino acids
  MISC_FEATURE (105): Xaa equals any of the twenty naturally occurring L-amino acids
  MISC_FEATURE (109): Xaa equals any of the twenty naturally occurring L-amino acids
  MISC_FEATURE (121): Xaa equals any of the twenty naturally occurring L-amino acids
  MISC_FEATURE (122): Xaa equals any of the twenty naturally occurring L-amino acids
  MISC_FEATURE (127): Xaa equals any of the twenty naturally occurring L-amino acids
  MISC_FEATURE (129): Xaa equals any of the twenty naturally occurring L-amino acids
XNKXIPGSTHAXAGFNLGNTATLTXSRAQAGDEADYYCQVWDSXPASWXFGGGTKLTVLGQPKAXPSXTXXPPSSEELXANKGTLVXLISDFYPXAXTVXXKADXNPSXGGSGDHHTLQAXXQQVRXQXVPEPDA

SEQ ID NO: 4270 - protein, 67 aa, Homo sapiens
  MISC_FEATURE (62): Xaa equals any of the twenty naturally occurring L-amino acids
VGSIYLIYLLQPHLNCKHSESMSHSRLYPWCLPQCPAYLQAFLYFLSKYPNRVVQNGCTDLXMTSAA

SEQ ID NO: 4271 - protein, 151 aa, Homo sapiens
  MISC_FEATURE (1): Xaa equals any of the twenty naturally occurring L-amino acids
XSGRGDLLYGCYTRPQINTEIVQNVTGPGQRTNMGILFMSKVGLRGDRRSEGDEVLDPLRQALDSSMQSHNLYQHPQRLAFHVSAPVASTVQQASGLLGPLPHLSSFALQPAHSLLPPLRLLATTRQLLPPKLTTRNRSPWLSWRRGFQKN

SEQ ID NO: 4272 - protein, 53 aa, Homo sapiens
  MISC_FEATURE (3): Xaa equals any of the twenty naturally occurring L-amino acids
  MISC_FEATURE (5): Xaa equals any of the twenty naturally occurring L-amino acids
  MISC_FEATURE (6): Xaa equals any of the twenty naturally occurring L-amino acids
  MISC_FEATURE (7): Xaa equals any of the twenty naturally occurring L-amino acids
  MISC_FEATURE (13): Xaa equals any of the twenty naturally occurring L-amino acids
GGXGXXXLLLGLXCHACRYRSGIPGSTHASGFSLPHYNFTKMLHCSRVNQDTL

SEQ ID NO: 4273 - protein, 193 aa, Homo sapiens
  MISC_FEATURE (184): Xaa equals any of the twenty naturally occurring L-amino acids
  MISC_FEATURE (187): Xaa equals any of the twenty naturally occurring L-amino acids
PSPRIPRSFHSVISTEHRGLTMEFGLSWVFLVAIIKGVQCQVQLVESGGGLVKPGGSLRLSCAASGFTFSDFYMSWIRQVPGKGLEWISYISPSATNIFYTDSVQDRFTISRDNAKNSLYLQMNSLRVEDTAVYFCARELFDGFDLWGQGTMVSVSSASPRAHRSSPGTLLQEHLWGHKRPWLXWSXTTFPNR

SEQ ID NO: 4274 - protein, 264 aa, Homo sapiens
  MISC_FEATURE (163): Xaa equals any of the twenty naturally occurring L-amino acids
  MISC_FEATURE (201): Xaa equals any of the twenty naturally occurring L-amino acids
  MISC_FEATURE (212): Xaa equals any of the twenty naturally occurring L-amino acids
  MISC_FEATURE (215): Xaa equals any of the twenty naturally occurring L-amino acids
  MISC_FEATURE (226): Xaa equals any of the twenty naturally occurring L-amino acids
  MISC_FEATURE (230): Xaa equals any of the twenty naturally occurring L-amino acids
  MISC_FEATURE (236): Xaa equals any of the twenty naturally occurring L-amino acids
  MISC_FEATURE (249): Xaa equals any of the twenty naturally occurring L-amino acids
  MISC_FEATURE (258): Xaa equals any of the twenty naturally occurring L-amino acids
  MISC_FEATURE (263): Xaa equals any of the twenty naturally occurring L-amino acids
GGSKMVLQTQVFISLLLWISGAYGDIVMTQSPDSLAMSLGERATINCKSSQSVLYSSNNKNYLAWYQQKPGQPPKLLIYWASTRDSGVPDRFSGSGSGTDFTLTISSLQAEDVAVYYCQQYYNTPQTFGQGTKLEIKRTVAAPSVFIFPPSDEQLKSGTASGXCLLNNFYPREAKVQWKVDNALQSGNFQEKCTEQDSKDXTYRLKQHPDAXAKXDYEETPRLRLXKHPXRAWSLXVQKSFNQGEKGLXGKGPHLVPXFQAGXL

SEQ ID NO: 4275 - protein, 43 aa, Homo sapiens
  MISC_FEATURE (1): Xaa equals any of the twenty naturally occurring L-amino acids
  MISC_FEATURE (10): Xaa equals any of the twenty naturally occurring L-amino acids
  MISC_FEATURE (14): Xaa equals any of the twenty naturally occurring L-amino acids
  MISC_FEATURE (24): Xaa equals any of the twenty naturally occurring L-amino acids
  MISC_FEATURE (27): Xaa equals any of the twenty naturally occurring L-amino acids
XTGLPSAQRXAKGXSDLWEERALXGQXSISLLRKATDDGEEMG

SEQ ID NO: 4276 - protein, 86 aa, Homo sapiens
PAFNFDPLFFLFVRCTRLPSCFSLLSCHQPFLLGGHVLGKRPHDLSGSTQCLRHPASFACIPQTISLILFTAANLSLVDETVFISL

SEQ ID NO: 4277 - protein, 213 aa, Homo sapiens
  MISC_FEATURE (1): Xaa equals any of the twenty naturally occurring L-amino acids
  MISC_FEATURE (6): Xaa equals any of the twenty naturally occurring L-amino acids
  MISC_FEATURE (29): Xaa equals any of the twenty naturally occurring L-amino acids
  MISC_FEATURE (111): Xaa equals any of the twenty naturally occurring L-amino acids
  MISC_FEATURE (178): Xaa equals any of the twenty naturally occurring L-amino acids
  MISC_FEATURE (186): Xaa equals any of the twenty naturally occurring L-amino acids
  MISC_FEATURE (203): Xaa equals any of the twenty naturally occurring L-amino acids
  MISC_FEATURE (204): Xaa equals any of the twenty naturally occurring L-amino acids
  MISC_FEATURE (211): Xaa equals any of the twenty naturally occurring L-amino acids
XPTERXCWYVCRNRPGIPGSTHASATMPXYTVVYFPVRGRCAALRMLLADQGQSWKEEVVTVETWQEGSLKASCLYGQLPKFQDGDLTLYQSNTILRHLGRTLGLYGKDQXEAALVDMVNDGVEDLRCKYISLIYTNYEAGKDDYVKALPGQLKPFETLLSQNQGGKTFIVGDQISFXDYNLLDLXLIHEVLAPGCLDAFPLXXAYVGRLXAR

SEQ ID NO: 4278 - protein, 83 aa, Homo sapiens
  MISC_FEATURE (13): Xaa equals any of the twenty naturally occurring L-amino acids
  MISC_FEATURE (22): Xaa equals any of the twenty naturally occurring L-amino acids
  MISC_FEATURE (37): Xaa equals any of the twenty naturally occurring L-amino acids
  MISC_FEATURE (65): Xaa equals any of the twenty naturally occurring L-amino acids
  MISC_FEATURE (67): Xaa equals any of the twenty naturally occurring L-amino acids
  MISC_FEATURE (69): Xaa equals any of the twenty naturally occurring L-amino acids
  MISC_FEATURE (77): Xaa equals any of the twenty naturally occurring L-amino acids
  MISC_FEATURE (82): Xaa equals any of the twenty naturally occurring L-amino acids
TVATGHSLNNHLXKLQVLEAGXFTHIEGIRGFLESWXGLQEQSEERPPSIRLGYWDDGLESKFKXLXLXGPLDNKGXNNIHXL

SEQ ID NO: 4279 - protein, 236 aa, Homo sapiens
  MISC_FEATURE (2): Xaa equals any of the twenty naturally occurring L-amino acids
  MISC_FEATURE (4): Xaa equals any of the twenty naturally occurring L-amino acids
  MISC_FEATURE (24): Xaa equals any of the twenty naturally occurring L-amino acids
  MISC_FEATURE (25): Xaa equals any of the twenty naturally occurring L-amino acids
  MISC_FEATURE (200): Xaa equals any of the twenty naturally occurring L-amino acids
  MISC_FEATURE (204): Xaa equals any of the twenty naturally occurring L-amino acids
  MISC_FEATURE (227): Xaa equals any of the twenty naturally occurring L-amino acids
  MISC_FEATURE (229): Xaa equals any of the twenty naturally occurring L-amino acids
VXLXRLQVPVRNSRVDPRVRAELXXMQDVVEDFKNKYEDEINRRTAAENEFVVLKKDVDAAYMSKVELEAKVDALNDEINFLRTLNETELTELQSQISDTSVVLSMDNSRSLDLDGIIAEVKAQYEEMAKCSRAEAEAWYQTKFETLQAQAGKHGDDLRNTRNEISEMNRAIQRLQAEIDNIKNQRAKLEAALPRLKSVXSCAXGCSCQSRKSWKARLQRPKAGYWXGXLREYQGT

SEQ ID NO: 4280 - protein, 147 aa, Homo sapiens
  MISC_FEATURE (9): Xaa equals any of the twenty naturally occurring L-amino acids
  MISC_FEATURE (121): Xaa equals any of the twenty naturally occurring L-amino acids
  MISC_FEATURE (134): Xaa equals any of the twenty naturally occurring L-amino acids
  MISC_FEATURE (137): Xaa equals any of the twenty naturally occurring L-amino acids
  MISC_FEATURE (138): Xaa equals any of the twenty naturally occurring L-amino acids
  MISC_FEATURE (145): Xaa equals any of the twenty naturally occurring L-amino acids
GEARQQALXWNLLSTWPTGLTTGAVGPASPSSGEPGLSRSAVGPRLPPLQGETLQSRCGGSPCRTGQAGSAAFWPKSVGTQCPGPGHELWPWATCQARQKRLYTGLGKTMELSTRSPVQAXPRGFRPTRAGLLXPPXXFTGTWQXGW

SEQ ID NO: 4281 - protein, 71 aa, Homo sapiens
  MISC_FEATURE (3): Xaa equals any of the twenty naturally occurring L-amino acids
  MISC_FEATURE (4): Xaa equals any of the twenty naturally occurring L-amino acids
  MISC_FEATURE (6): Xaa equals any of the twenty naturally occurring L-amino acids
  MISC_FEATURE (54): Xaa equals any of the twenty naturally occurring L-amino acids
DKXXAXKYEQGTGCWQGPNRSTTVRLLCGKETMVTSTTEPSRCEYLMELMTPAXCPEPPPEAPTEDDHDEL

SEQ ID NO: 4282 - protein, 165 aa, Homo sapiens
  MISC_FEATURE (4): Xaa equals any of the twenty naturally occurring L-amino acids
  MISC_FEATURE (16): Xaa equals any of the twenty naturally occurring L-amino acids
  MISC_FEATURE (101): Xaa equals any of the twenty naturally occurring L-amino acids
  MISC_FEATURE (113): Xaa equals any of the twenty naturally occurring L-amino acids
  MISC_FEATURE (146): Xaa equals any of the twenty naturally occurring L-amino acids
  MISC_FEATURE (149): Xaa equals any of the twenty naturally occurring L-amino acids
  MISC_FEATURE (164): Xaa equals any of the twenty naturally occurring L-amino acids
  MISC_FEATURE (165): Xaa equals any of the twenty naturally occurring L-amino acids
PYTXIYGKTHSLLGKXAACRYRSGIPGSTHAFGTISSMAWSPLLLTLLAHCTGSWAQSVLTQPPSVSGAPGQRVTISCTGSSSTIGAGYDVHWYRQLPGTXPKLLMYAYDNRXSGVPDRFSGSRSGTSAFLGIGGLQPEDEADYYXQSXDNNLSGYVFGTGTKXX

SEQ ID NO: 4283 - protein, 147 aa, Homo sapiens
  MISC_FEATURE (4): Xaa equals any of the twenty naturally occurring L-amino acids
  MISC_FEATURE (6): Xaa equals any of the twenty naturally occurring L-amino acids
  MISC_FEATURE (49): Xaa equals any of the twenty naturally occurring L-amino acids
  MISC_FEATURE (146): Xaa equals any of the twenty naturally occurring L-amino acids
  MISC_FEATURE (147): Xaa equals any of the twenty naturally occurring L-amino acids
GHRXHXGPGGSMGGGGGHRPHEGPGGGISGGSGHRPHEGPGGGMGAGGXHRPHEGPGGSMVGSGGHRPHEGPGHGGPHGHRPHDVPGHRGHDHRGPPPHEHRGHDGPGHGGGGHRGHDGGHSHGGGEDAPCPPYAFWLSHTSFWGXX

SEQ ID NO: 4284 - protein, 138 aa, Homo sapiens
  MISC_FEATURE (3): Xaa equals any of the twenty naturally occurring L-amino acids
LKXLDCPSESTGNGPPHLAHPNLDTFTPEELLQQMKELLTENHQLKEAMKLNNQAMKGRFEELSAWTEKQKEERQFFEIQSKEAKERLMALSHENEKLKEELGKLKGNQKGHLRTPLMTPGFPGPKRSRKRTSSGPRW

SEQ ID NO: 4285 - protein, 116 aa, Homo sapiens
TVASGIPAGWMGLDCGPESSKKYAEAVTRAKQIVWNGPVGVFEWEAFARGTKALMDEVVKATSRGCITIIGGGDTATCCAKWNTEDKVSHVSTGGGASLELLEGKVLPGVDALSNI

SEQ ID NO: 4286 - protein, 135 aa, Homo sapiens
ADAWADAWADAWVRAEMSRSVALAVLALLSLSGLEAIQRTPKIQVYSRHPAENGKSNFLNCYVSGFHPSDIEVDLLKNGERIEKVEHSDLSFSKDWSFYLLYYTEFTPTEKDEYACRVNHVTLSQPKIVKWDRDM

SEQ ID NO: 4287 - protein, 116 aa, Homo sapiens
TAVCYSAIIFETPLRVDVAVLKARAKLLQKYLCDEQKELQALYALQALVVTLEQPPNLLRMFFDALYDEDVVKEDAFYSWESSKDPAEQQGKGVALKSVTAFFKWLREAEEESDHN

SEQ ID NO: 4288 - protein, 39 aa, Homo sapiens
CTTRFFETCDLDNDKYIALDEWAGCFGIKQKDIDKDLVI

SEQ ID NO: 4289 - protein, 139 aa, Homo sapiens
  MISC_FEATURE (5): Xaa equals any of the twenty naturally occurring L-amino acids
  MISC_FEATURE (13): Xaa equals any of the twenty naturally occurring L-amino acids
  MISC_FEATURE (26): Xaa equals any of the twenty naturally occurring L-amino acids
  MISC_FEATURE (45): Xaa equals any of the twenty naturally occurring L-amino acids
  MISC_FEATURE (52): Xaa equals any of the twenty naturally occurring L-amino acids
  MISC_FEATURE (69): Xaa equals any of the twenty naturally occurring L-amino acids
RVPAXLLGLLLLXLPGAKCDIQMTQXPSTLSASVGDRVTITCRAXQSISSWXAWYQQKPGKAPKLLIYXASSLESGVPSRFSGSGSGTEFTLTISSLQPDDFATYYCQHYNSYPYTFGQGPSWRSNELWLHHLLHLPAI

SEQ ID NO: 4290 - protein, 215 aa, Homo sapiens
  MISC_FEATURE (168): Xaa equals any of the twenty naturally occurring L-amino acids
DKRVEPKSCDKTHTCPPCPAPELLGGPSVFLFPPKPKDTLMISRTPEVTCVVVDVSHEDPEVKFNWYVDGVEVHNAKTKPREEQYNSTYRVVSVLTVLHQDWLNGKEYKCKVSNKALPAPIEKTISKAKGQPREPQVYTLPPSREEMTKNQVSLTCLVKGFYPSDIAXEWESSGQPENNYQTTPPVLDSDGSFFLYSKLPWTRQVAAGGTSSHAP

SEQ ID NO: 4291 - protein, 117 aa, Homo sapiens
  MISC_FEATURE (6): Xaa equals any of the twenty naturally occurring L-amino acids
  MISC_FEATURE (10): Xaa equals any of the twenty naturally occurring L-amino acids
  MISC_FEATURE (88): Xaa equals any of the twenty naturally occurring L-amino acids
  MISC_FEATURE (89): Xaa equals any of the twenty naturally occurring L-amino acids
  MISC_FEATURE (90): Xaa equals any of the twenty naturally occurring L-amino acids
  MISC_FEATURE (105): Xaa equals any of the twenty naturally occurring L-amino acids
  MISC_FEATURE (107): Xaa equals any of the twenty naturally occurring L-amino acids
  MISC_FEATURE (110): Xaa equals any of the twenty naturally occurring L-amino acids
GGVFFXNRQXSSTAMTVMADLGERMVRENLKVWIYPEGTRNDNGDLLPFKKGAFYLAVQAQVPIVPVVYSSFSSFYNTKKKVFTLRTXXXGKCWKPFPPKGSLWXTXLRXWTPVTGP

SEQ ID NO: 4292 - protein, 49 aa, Homo sapiens
  MISC_FEATURE (2): Xaa equals any of the twenty naturally occurring L-amino acids
EXMWIKCLGSMWLTQPESLSLCVSVSQDWAHILALSITMLWDFREFPHL

SEQ ID NO: 4293 - protein, 106 aa, Homo sapiens
  MISC_FEATURE (34): Xaa equals any of the twenty naturally occurring L-amino acids
  MISC_FEATURE (63): Xaa equals any of the twenty naturally occurring L-amino acids
  MISC_FEATURE (106): Xaa equals any of the twenty naturally occurring L-amino acids
GQSPAWPGFPLLLTLLTHCAGSWAQSVLTQPPSXSGTPGQRVTISCSGSSFNVGSNHVYWYQXLPGAVPKLLIYRNDQRPQGSLTDSLATSLAPRTPWHQWAPVRX

SEQ ID NO: 4294 - protein, 113 aa, Homo sapiens
AKKATSCFPRPMTPRDRHEGRKQSTTEAQKKAAPASTKQADRRQSMAFSILNTPKKLGNSLLRRGASKKALSKASPNTRSGTRRSPRIATTTASAATAAAIGATPRAKGKAKH

SEQ ID NO: 4295 - protein, 258 aa, Homo sapiens
  MISC_FEATURE (200): Xaa equals any of the twenty naturally occurring L-amino acids
  MISC_FEATURE (202): Xaa equals any of the twenty naturally occurring L-amino acids
  MISC_FEATURE (211): Xaa equals any of the twenty naturally occurring L-amino acids
  MISC_FEATURE (214): Xaa equals any of the twenty naturally occurring L-amino acids
  MISC_FEATURE (219): Xaa equals any of the twenty naturally occurring L-amino acids
  MISC_FEATURE (257): Xaa equals any of the twenty naturally occurring L-amino acids
LTSTMAVGKNKRLTKGGKKGAKKKVVDPFSKKDWYDVKAPAMFNIRNIGKTLVTRTQGTKIASDGLKGRVFEVSLADLQNDEVAFRKFKLITEDVQGKNCLTNFHGMDLTRDKMCSMVKKWQTMIEAHVDVKTTDGYLLRLFCVGFTKKRNNQIRKTSYAQHQQVRQIRKKMMEIMTREVQTNDLKEVVNKLIPKGNQGXKXLGGKKKRNXLRXKKRAXFGPILIYPLHDGFVRKVKMLKKPKFELGKLMELHGESXS

SEQ ID NO: 4296 - protein, 97 aa, Homo sapiens
SVLTQPPSVSGAPGQRVTISCTGSSSNIGAGYDVHWYQQHPGTAPKLLINGNSNRPSGVPNRFSGSKSGTSASLAITGLQAEDEADYYCQSYDSKPE

SEQ ID NO: 4297 - protein, 115 aa, Homo sapiens
  MISC_FEATURE (7): Xaa equals any of the twenty naturally occurring L-amino acids
  MISC_FEATURE (8): Xaa equals any of the twenty naturally occurring L-amino acids
  MISC_FEATURE (10): Xaa equals any of the twenty naturally occurring L-amino acids
  MISC_FEATURE (13): Xaa equals any of the twenty naturally occurring L-amino acids
  MISC_FEATURE (16): Xaa equals any of the twenty naturally occurring L-amino acids
  MISC_FEATURE (22): Xaa equals any of the twenty naturally occurring L-amino acids
  MISC_FEATURE (25): Xaa equals any of the twenty naturally occurring L-amino acids
  MISC_FEATURE (29): Xaa equals any of the twenty naturally occurring L-amino acids
  MISC_FEATURE (30): Xaa equals any of the twenty naturally occurring L-amino acids
  MISC_FEATURE (32): Xaa equals any of the twenty naturally occurring L-amino acids
  MISC_FEATURE (35): Xaa equals any of the twenty naturally occurring L-amino acids
  MISC_FEATURE (38): Xaa equals any of the twenty naturally occurring L-amino acids
  MISC_FEATURE (47): Xaa equals any of the twenty naturally occurring L-amino acids
  MISC_FEATURE (53): Xaa equals any of the twenty naturally occurring L-amino acids
  MISC_FEATURE (62): Xaa equals any of the twenty naturally occurring L-amino acids
  MISC_FEATURE (80): Xaa equals any of the twenty naturally occurring L-amino acids
  MISC_FEATURE (87): Xaa equals any of the twenty naturally occurring L-amino acids
  MISC_FEATURE (88): Xaa equals any of the twenty naturally occurring L-amino acids
  MISC_FEATURE (93): Xaa equals any of the twenty naturally occurring L-amino acids
  MISC_FEATURE (95): Xaa equals any of the twenty naturally occurring L-amino acids
  MISC_FEATURE (106): Xaa equals any of the twenty naturally occurring L-amino acids
  MISC_FEATURE (111): Xaa equals any of the twenty naturally occurring L-amino acids
  MISC_FEATURE (112): Xaa equals any of the twenty naturally occurring L-amino acids
FLHQSHXXRXHAXKLXKLHNQXGGXIFLXXIXKPXCDXWHSGLNAMXCALHLXKNVNHSLLXLHKLATDKNDPHLCDFIXTHYLNEXXKAITXLXDHVTNLRKMAXPNLLXXISL

SEQ ID NO: 4298 - protein, 144 aa, Homo sapiens
  MISC_FEATURE (2): Xaa equals any of the twenty naturally occurring L-amino acids
  MISC_FEATURE (14): Xaa equals any of the twenty naturally occurring L-amino acids
  MISC_FEATURE (24): Xaa equals any of the twenty naturally occurring L-amino acids
  MISC_FEATURE (25): Xaa equals any of the twenty naturally occurring L-amino acids
  MISC_FEATURE (29): Xaa equals any of the twenty naturally occurring L-amino acids
  MISC_FEATURE (40): Xaa equals any of the twenty naturally occurring L-amino acids
  MISC_FEATURE (67): Xaa equals any of the twenty naturally occurring L-amino acids
  MISC_FEATURE (85): Xaa equals any of the twenty naturally occurring L-amino acids
  MISC_FEATURE (116): Xaa equals any of the twenty naturally occurring L-amino acids
  MISC_FEATURE (126): Xaa equals any of the twenty naturally occurring L-amino acids
  MISC_FEATURE (132): Xaa equals any of the twenty naturally occurring L-amino acids
  MISC_FEATURE (135): Xaa equals any of the twenty naturally occurring L-amino acids
  MISC_FEATURE (136): Xaa equals any of the twenty naturally occurring L-amino acids
AXPFPWQVEILNVXNMNPMMAQMXXSSLXMPGMNTVCPEXINDPALRHTGLYCNQLSSTDLLKTEAXGTQDKKTEQFFSVVTTDXRNALQVQQVQVFADVQCTVNLVGGDPYLNQXGPLGTQKPRXDHRPPXPAXXLLQQLLLE

SEQ ID NO: 4299 - protein, 79 aa, Homo sapiens
  MISC_FEATURE (11): Xaa equals any of the twenty naturally occurring L-amino acids
  MISC_FEATURE (18): Xaa equals any of the twenty naturally occurring L-amino acids
  MISC_FEATURE (55): Xaa equals any of the twenty naturally occurring L-amino acids
  MISC_FEATURE (64): Xaa equals any of the twenty naturally occurring L-amino acids
  MISC_FEATURE (79): Xaa equals any of the twenty naturally occurring L-amino acids
TVMFSDANSAXGFILCLXFICILIFNTPASRPYVGKSIFVCFSCSIISLQYCLVXKMTIDMLFXYNYFSCTNSTMLVNX

SEQ ID NO: 4300 - protein, 153 aa, Homo sapiens
  MISC_FEATURE (1): Xaa equals any of the twenty naturally occurring L-amino acids
  MISC_FEATURE (5): Xaa equals any of the twenty naturally occurring L-amino acids
  MISC_FEATURE (9): Xaa equals any of the twenty naturally occurring L-amino acids
  MISC_FEATURE (19): Xaa equals any of the twenty naturally occurring L-amino acids
  MISC_FEATURE (22): Xaa equals any of the twenty naturally occurring L-amino acids
  MISC_FEATURE (39): Xaa equals any of the twenty naturally occurring L-amino acids
  MISC_FEATURE (43): Xaa equals any of the twenty naturally occurring L-amino acids
  MISC_FEATURE (55): Xaa equals any of the twenty naturally occurring L-amino acids
  MISC_FEATURE (71): Xaa equals any of the twenty naturally occurring L-amino acids
  MISC_FEATURE (73): Xaa equals any of the twenty naturally occurring L-amino acids
  MISC_FEATURE (117): Xaa equals any of the twenty naturally occurring L-amino acids
  MISC_FEATURE (119): Xaa equals any of the twenty naturally occurring L-amino acids
  MISC_FEATURE (121): Xaa equals any of the twenty naturally occurring L-amino acids
  MISC_FEATURE (126): Xaa equals any of the twenty naturally occurring L-amino acids
  MISC_FEATURE (134): Xaa equals any of the twenty naturally occurring L-amino acids
  MISC_FEATURE (136): Xaa equals any of the twenty naturally occurring L-amino acids
  MISC_FEATURE (138): Xaa equals any of the twenty naturally occurring L-amino acids
  MISC_FEATURE (139): Xaa equals any of the twenty naturally occurring L-amino acids
  MISC_FEATURE (141): Xaa equals any of the twenty naturally occurring L-amino acids
  MISC_FEATURE (145): Xaa equals any of the twenty naturally occurring L-amino acids
  MISC_FEATURE (148): Xaa equals any of the twenty naturally occurring L-amino acids
  MISC_FEATURE (151): Xaa equals any of the twenty naturally occurring L-amino acids
  MISC_FEATURE (153): Xaa equals any of the twenty naturally occurring L-amino acids
XIPPXEIVXTQSPATLSLXPGXRATLSCRASHSVSSYLXWYQXKPGQAPRLLIYXTSNRATGIPARFSGSXSXTDFTLTISSLQPEHFAPYYCQHRTNWPSGKHFLAKGTKLGESNXLXAXPIWPXIFPAILEXTXLXXLXNLAXSWXRPXLX

SEQ ID NO: 4301 - protein, 70 aa, Homo sapiens
  MISC_FEATURE (7): Xaa equals any of the twenty naturally occurring L-amino acids
  MISC_FEATURE (21): Xaa equals any of the twenty naturally occurring L-amino acids
  MISC_FEATURE (32): Xaa equals any of the twenty naturally occurring L-amino acids
  MISC_FEATURE (33): Xaa equals any of the twenty naturally occurring L-amino acids
  MISC_FEATURE (36): Xaa equals any of the twenty naturally occurring L-amino acids
  MISC_FEATURE (38): Xaa equals any of the twenty naturally occurring L-amino acids
  MISC_FEATURE (41): Xaa equals any of the twenty naturally occurring L-amino acids
  MISC_FEATURE (42): Xaa equals any of the twenty naturally occurring L-amino acids
  MISC_FEATURE (46): Xaa equals any of the twenty naturally occurring L-amino acids
  MISC_FEATURE (50): Xaa equals any of the twenty naturally occurring L-amino acids
  MISC_FEATURE (51): Xaa equals any of the twenty naturally occurring L-amino acids
  MISC_FEATURE (55): Xaa equals any of the twenty naturally occurring L-amino acids
  MISC_FEATURE (56): Xaa equals any of the twenty naturally occurring L-amino acids
  MISC_FEATURE (64): Xaa equals any of the twenty naturally occurring L-amino acids
  MISC_FEATURE (65): Xaa equals any of the twenty naturally occurring L-amino acids
  MISC_FEATURE (70): Xaa equals any of the twenty naturally occurring L-amino acids
LNLFSTXAAYIAKLPSIRLHXDFNKHYLPTYXXLLXIXFTXXKLFXIIKXXLFLXXQFILYGFXXMLHLX

SEQ ID NO: 4302 - protein, 117 aa, Homo sapiens
HSMDMRVLAQLLGLLLLCFPGARCDIQMTQSPSSLSASVGDRVTITCRASQAISNSLAWFQQKPGKAPKSLIYAASSLQSGVPSKFSGSGSGTDFTLTISSLQPEDFATYYCQQYDT

SEQ ID NO: 4303 - protein, 55 aa, Homo sapiens
KPWDKCPWAAGLGTGGAWPAYHLVCPQVKEYDSISRLDQWLTTMLLRIKKTIQGD

SEQ ID NO: 4304 - protein, 134 aa, Homo sapiens
  MISC_FEATURE (118): Xaa equals any of the twenty naturally occurring L-amino acids
GRVGGRVGGGGTFDVSILTIEDGIFEVKSTAGDTHLGGEDFDNRMVNHFIAEFKRKHKKDISENKRAVRRLRTACERAKRTLSSSTQASIEIDSLYEGIDFYTSITRARFEELNADLXRGTWNPVKKGLSRMPN

SEQ ID NO: 4305 - protein, 147 aa, Homo sapiens
  MISC_FEATURE (11): Xaa equals any of the twenty naturally occurring L-amino acids
  MISC_FEATURE (60): Xaa equals any of the twenty naturally occurring L-amino acids
  MISC_FEATURE (127): Xaa equals any of the twenty naturally occurring L-amino acids
ALSLLIADVWXIVGATVDTTVNPSGVCTAAVFFTHFFYLSLFFWMLMLGILLAYRIILVXHHMAQHLMMAVGFCLGYGCPLIISVITIAVTQPSNTYKRKDVCWLNWSNGSKPLLAFVVPALAIVAXNFVVVLLVLTKLWRPTLGKD

SEQ ID NO: 4306 - protein, 149 aa, Homo sapiens
  MISC_FEATURE (88): Xaa equals any of the twenty naturally occurring L-amino acids
GRVGPGLKGHNGLQGLPGIAGHHGDQGAPGSVGPAGPRGPAGPSGPAGKDGRTGHPGTVGPAGIRGPQGHQGPAGPPGPPGPPGPPGXSGGGYDFGYDGDFYRADQASLSTFSQPKDYELDATLKSLNNQIETLLTPEGSRKNPVRTCP

SEQ ID NO: 4307 - protein, 58 aa, Homo sapiens
LFLSDFSRIWKLFVSILNLWQYSYLHKCSKNLFSFVTGHIWRIWLFYQGFDWNHVLSL

SEQ ID NO: 4308 - protein, 201 aa, Homo sapiens
  MISC_FEATURE (135): Xaa equals any of the twenty naturally occurring L-amino acids
  MISC_FEATURE (136): Xaa equals any of the twenty naturally occurring L-amino acids
  MISC_FEATURE (140): Xaa equals any of the twenty naturally occurring L-amino acids
  MISC_FEATURE (143): Xaa equals any of the twenty naturally occurring L-amino acids
  MISC_FEATURE (144): Xaa equals any of the twenty naturally occurring L-amino acids
  MISC_FEATURE (145): Xaa equals any of the twenty naturally occurring L-amino acids
  MISC_FEATURE (151): Xaa equals any of the twenty naturally occurring L-amino acids
  MISC_FEATURE (159): Xaa equals any of the twenty naturally occurring L-amino acids
  MISC_FEATURE (172): Xaa equals any of the twenty naturally occurring L-amino acids
  MISC_FEATURE (174): Xaa equals any of the twenty naturally occurring L-amino acids
  MISC_FEATURE (180): Xaa equals any of the twenty naturally occurring L-amino acids
SHSVLPPLRRRVSLPVAMEEEIAALVIDNGSGMCKAGFAGDDAPRAVFPSIVGRPRHQGVMVGMGQKDSYVGDEAQSKRGILTLKYPFEHGIVTNWDDMEKIWHHTFYNELRVAPEEAPSAADRGPLNPKATERXXLKIXFGXXXTPAMNXAIQAGLPXTPLAAPLAIARTXEXGVTHTXPIYEGYALPHAILRLDLAGRT

SEQ ID NO: 4309 - protein, 45 aa, Homo sapiens
DFFWSVFASILHIVSLILSTFLETWVSITRASRDEFGSVSPSMTA

SEQ ID NO: 4310 - protein, 210 aa, Homo sapiens
  MISC_FEATURE (1): Xaa equals any of the twenty naturally occurring L-amino acids
  MISC_FEATURE (2): Xaa equals any of the twenty naturally occurring L-amino acids
  MISC_FEATURE (44): Xaa equals any of the twenty naturally occurring L-amino acids
  MISC_FEATURE (48): Xaa equals any of the twenty naturally occurring L-amino acids
XXSCDELIPEYLNFIRGVVDSEDLPLNISREMLQQSKILKVIRXNIVXKCLELFSELAEDKENYKKFYEAFSKNLKLGIHEDSTNRRRLSELLRYHTSQSGDEMTSLSEYVSRMKETQKSIYYITGESKEQVANSAFVERVRKRGFEVVYMTEPIDEYCVQQLKEFDGKSLVSVTKEGLELPEDEEEKKKMEESKGKGLKNLCKLMKGKS

SEQ ID NO: 4311 - protein, 77 aa, Homo sapiens
  MISC_FEATURE (26): Xaa equals any of the twenty naturally occurring L-amino acids
  MISC_FEATURE (30): Xaa equals any of the twenty naturally occurring L-amino acids
  MISC_FEATURE (54): Xaa equals any of the twenty naturally occurring L-amino acids
VPLCIAPVPTRTLSGPLQLDGQWRVXGGAXRPNGPAAGNKICQFKLVLLGESAXGRSSLVLRFGRTVTRPERQLSAF

SEQ ID NO: 4312 - protein, 61 aa, Homo sapiens
GKLVRLQVPVRNSRVDPRVRFFEVMVAGKLIHSKKKGDGYVDTESKFLKLVAAIKAALAQG

SEQ ID NO: 4313 - protein, 154 aa, Homo sapiens
  MISC_FEATURE (59): Xaa equals any of the twenty naturally occurring L-amino acids
  MISC_FEATURE (60): Xaa equals any of the twenty naturally occurring L-amino acids
  MISC_FEATURE (80): Xaa equals any of the twenty naturally occurring L-amino acids
  MISC_FEATURE (81): Xaa equals any of the twenty naturally occurring L-amino acids
  MISC_FEATURE (97): Xaa equals any of the twenty naturally occurring L-amino acids
  MISC_FEATURE (104): Xaa equals any of the twenty naturally occurring L-amino acids
  MISC_FEATURE (129): Xaa equals any of the twenty naturally occurring L-amino acids
  MISC_FEATURE (142): Xaa equals any of the twenty naturally occurring L-amino acids
  MISC_FEATURE (143): Xaa equals any of the twenty naturally occurring L-amino acids
  MISC_FEATURE (145): Xaa equals any of the twenty naturally occurring L-amino acids
  MISC_FEATURE (146): Xaa equals any of the twenty naturally occurring L-amino acids
HNVKKNSNIRTGRRNGLLGSPSRTLGAHRDSPMFVELRVILMLFFIIHTYMQRRYGLGXXGYTLAPKYSRIYTKIILDEXXEMLYDTTVAMTEERSXRPETGLXFRRPNPRRSGKVRLRETLPAAELGXTHACIELSLKQRXXRXXATITFLNF

SEQ ID NO: 4314 - protein, 61 aa, Homo sapiens
  MISC_FEATURE (25): Xaa equals any of the twenty naturally occurring L-amino acids
  MISC_FEATURE (53): Xaa equals any of the twenty naturally occurring L-amino acids
  MISC_FEATURE (57): Xaa equals any of the twenty naturally occurring L-amino acids
WTSRGSPLGGLSLPCGAFLKRLRPXPNDAIQRSTPGRKLPRWNASPEQRVAIXLWRXNTVA

SEQ ID NO: 4315 - protein, 55 aa, Homo sapiens
  MISC_FEATURE (26): Xaa equals any of the twenty naturally occurring L-amino acids
INRKRSLHAWFLKGDDECDTTHRMHXNLGFLALHFTLIGNFGTNFVHNLINGLDK

SEQ ID NO: 4316 - protein, 95 aa, Homo sapiens
EQQFIRVQPQTGKKMLIKVKTLTGKEIEIDIEPTDKVERIKERVEEKEGIPPQQQRLIYSGKQMNDEKTAADYKILGGSVLHLVLALRGGGGLRQ

SEQ ID NO: 4317 - protein, 103 aa, Homo sapiens
ESFRDLDPEQGHTVYAKKLWTAPELLRMASPPVRGSQAGDVYSFGIILQEIALRSGVFHVEGLDLSPKEIIERVTRGEQPPFRPSLALQSHLEELGLSCSGAG

SEQ ID NO: 4318 - protein, 81 aa, Homo sapiens
NFCSWEMFSFSPWPYGRSFPPCFFPHRKNPPVALRFFSQDGSRIRITVGGCGVDTPVDSFPADCQSLRPSTPWISSAECLG

SEQ ID NO: 4319 - protein, 136 aa, Homo sapiens
EAPGFFLDLEPIPGALDAVREMNDLPDTQVFICTSPLLKYHHCVGEKYRWVEQHLGPQFVERIILTRDKTVVLGDLLIDDKDTVRGQEETPSWEHILFTCCHNRHLVLPPTRRRLLSWSDNWREILDSKRGAAQRE

SEQ ID NO: 4320 - protein, 58 aa, Homo sapiens
  MISC_FEATURE (29): Xaa equals any of the twenty naturally occurring L-amino acids
  MISC_FEATURE (31): Xaa equals any of the twenty naturally occurring L-amino acids
DWKLHSKTLPPGSFSLFLLLTALESTGWXLXRFSETGGKIFLWQRPLSKGGVLESQCP

SEQ ID NO: 4321 - protein, 128 aa, Homo sapiens
LVRLQVPVRNSRVDPRVRDAPQEMGDENAEITEEMMDQANDKKVAAIEALNDGELQKAIDLFTDAIKLNPRLAILYAKRASVFVKLQKPNAAIRDCDRAIEINPDSSSALQVAGESTQTSRPLGRSSP

SEQ ID NO: 4322 - protein, 258 aa, Homo sapiens
  MISC_FEATURE (214): Xaa equals any of the twenty naturally occurring L-amino acids
  MISC_FEATURE (226): Xaa equals any of the twenty naturally occurring L-amino acids
  MISC_FEATURE (243): Xaa equals any of the twenty naturally occurring L-amino acids
  MISC_FEATURE (248): Xaa equals any of the twenty naturally occurring L-amino acids
  MISC_FEATURE (256): Xaa equals any of the twenty naturally occurring L-amino acids
VFPLAPCSRSTSESTAALGCLVKDYFPEPVTVSWNSGALTSGVHTFPAVLQSSGLYSLSSVVTVTSSNFGTQTYTCNVDHKPSNTKVDKTVERKCCVECPPCPAPPVAGPSVFLFPPKPKDTLMISRTPEVTCVVVDVSHEDPEVQFNWYVDGMEVHNAKTKPREEQFNSTFRVVSVLTVVHQDWLNGKEYKCKVSNKGLPAPIEKTIFQTKGXPREPQVYTLAPXREEMTKNQVSLTGWQRXYPGHXLNGKQWQXEK

SEQ ID NO: 4323 - protein, 232 aa, Homo sapiens
  MISC_FEATURE (167): Xaa equals any of the twenty naturally occurring L-amino acids
  MISC_FEATURE (200): Xaa equals any of the twenty naturally occurring L-amino acids
  MISC_FEATURE (220): Xaa equals any of the twenty naturally occurring L-amino acids
  MISC_FEATURE (232): Xaa equals any of the twenty naturally occurring L-amino acids
VEGSPMHGVYMSQPAPAAGPYPSMPSTAADPSMVSAYMYPAGATGAQAAPQAQAGPTASPAYSSYQPTPTAGYQNVASQAPQSLPAISQPPQSSTMGYMGSQSVSMGYQPYNMQNLMTTLPSQDASLPPQQPYIAGQQPMYQQMAPSGGPPQQQPPVAQQPQAQGPXAQGKRGPAHFIRLTQAMLTSGVTLHTVHLKRLXRQPQPRVEASGLQLLCFSTXHLQCPKNGTSDX

SEQ ID NO: 4324 - protein, 196 aa, Homo sapiens
ENMITGTSQADCAVLIVAAGVGEFEAGISKNGQTREHALLAYTLGVKQLIVGVNKMDSTEPPYSQKRYEEIVKEVSTYIKKIGYNPDTVAFVPISGWNGDNMLEPSANMPWFKGWKVTRKDGNASGTTLLEALDCILPPTRPTDKPLRLPLQDVYKIGGIGTGPVAEWRLVVSNPVWWAPLLQSTVNGSKIWRNAP

SEQ ID NO: 4325 - protein, 206 aa, Homo sapiens
  MISC_FEATURE (191): Xaa equals any of the twenty naturally occurring L-amino acids
SALSASVGDRVIITCQASQDIGKCLNWYQQKSGKAPKLLIYDASSLETGVPSTFSASGSGTDFTLTISSLQPEDFATYYCQQCDHLPYTFGQGTKVEIKRTVAAPSVFIFPPSDEQLKSGTASVVCLLNNFYPREAKVQWKVDNALQSGNSQESVTEQDSKDSTYSLSSTLTLSKADYEKHKVYACEVTHXGLSSPVTKSFNRGEC

SEQ ID NO: 4326 - protein, 46 aa, Homo sapiens
  MISC_FEATURE (3): Xaa equals any of the twenty naturally occurring L-amino acids
VVXCGDDFIVYLDSKGGQITTGMKLKDYPALNEFHLLSFTLYLCIL

SEQ ID NO: 4327 - protein, 199 aa, Homo sapiens
  MISC_FEATURE (198): Xaa equals any of the twenty naturally occurring L-amino acids
VPHDLDMLLRATYFGSIVLLSPAVIDSPLKLELRVLAPPRCTIKPSGTTISVTASVTIALVPPDQPEVQLSSMTMDARLSAKMALRGKALRTQLDLRRFRIYSNHSALESLALIPLQAPLKTMLQIGVMPMLNERTWRGVQIPLPEGINFVHEVVTNHAGFLTIGADLHFAKGLREVIEKNRPADVRAVTAPTPSTAXV

SEQ ID NO: 4328 - protein, 40 aa, Homo sapiens
  MISC_FEATURE (24): Xaa equals any of the twenty naturally occurring L-amino acids
  MISC_FEATURE (29): Xaa equals any of the twenty naturally occurring L-amino acids
DQLLYNPFLKMCLSANGEHPSLVXCNPSXPLQKWILSQND

SEQ ID NO: 4329 - protein, 51 aa, Homo sapiens
  MISC_FEATURE (14): Xaa equals any of the twenty naturally occurring L-amino acids
  MISC_FEATURE (20): Xaa equals any of the twenty naturally occurring L-amino acids
  MISC_FEATURE (28): Xaa equals any of the twenty naturally occurring L-amino acids
  MISC_FEATURE (37): Xaa equals any of the twenty naturally occurring L-amino acids
  MISC_FEATURE (38): Xaa equals any of the twenty naturally occurring L-amino acids
  MISC_FEATURE (42): Xaa equals any of the twenty naturally occurring L-amino acids
  MISC_FEATURE (50): Xaa equals any of the twenty naturally occurring L-amino acids
IQFLKVMVFFYHLXYHCFIXINYFLIAXGIDISDCVXXLFKXFIRKYCLXS

SEQ ID NO: 4330 - protein, 51 aa, Homo sapiens
  MISC_FEATURE (32): Xaa equals any of the twenty naturally occurring L-amino acids
  MISC_FEATURE (36): Xaa equals any of the twenty naturally occurring L-amino acids
  MISC_FEATURE (46): Xaa equals any of the twenty naturally occurring L-amino acids
  MISC_FEATURE (49): Xaa equals any of the twenty naturally occurring L-amino acids
NLICEQLCLKHSDQVIFNLVFTLETSQSFRYXSNVXKPELDVSKWXLTXFI

SEQ ID NO: 4331 - protein, 193 aa, Homo sapiens
  MISC_FEATURE (5): Xaa equals any of the twenty naturally occurring L-amino acids
  MISC_FEATURE (188): Xaa equals any of the twenty naturally occurring L-amino acids
LLCKXMKHLWFFLLLVAAPRWVLSQVQLQESGPGLVKPSETLSLTCTVSGGSISSYYWSWIRQPPGKGLEWIGYIYYSGSTNYNPSLKSRVTISVDTSKNQFSLKLSSVTAADTAVYYCARGPYSSSWYPRAEYFQHWGQGTLVTVSSASTKGPSVFPLAPSSKSTSGGTAALGCLVKDYFPEPVTVXGTQAP

SEQ ID NO: 4332 - protein, 181 aa, Homo sapiens
  MISC_FEATURE (10): Xaa equals any of the twenty naturally occurring L-amino acids
  MISC_FEATURE (15): Xaa equals any of the twenty naturally occurring L-amino acids
  MISC_FEATURE (20): Xaa equals any of the twenty naturally occurring L-amino acids
  MISC_FEATURE (45): Xaa equals any of the twenty naturally occurring L-amino acids
  MISC_FEATURE (82): Xaa equals any of the twenty naturally occurring L-amino acids
  MISC_FEATURE (106): Xaa equals any of the twenty naturally occurring L-amino acids
  MISC_FEATURE (156): Xaa equals any of the twenty naturally occurring L-amino acids
  MISC_FEATURE (168): Xaa equals any of the twenty naturally occurring L-amino acids
  MISC_FEATURE (171): Xaa equals any of the twenty naturally occurring L-amino acids
  MISC_FEATURE (173): Xaa equals any of the twenty naturally occurring L-amino acids
  MISC_FEATURE (176): Xaa equals any of the twenty naturally occurring L-amino acids
GILLTIGKAXEPAWXGPEFXGRPTRPVPAQLLGLLLLSLPGSRCXIQMTQSPSSVSASVGDRVTITCRASQGITTWLAWYQXRPGKAPTLLIYAASSLQSGVPSRXSGVDLGQISLSPLVACSLKTLQLTIVNRLTHSLSLSAEGPRWRSSELWLXHLASSSRHLMSXLKXGXGSXGGLVE

SEQ ID NO: 4333 - protein, 148 aa, Homo sapiens
  MISC_FEATURE (3): Xaa equals any of the twenty naturally occurring L-amino acids
  MISC_FEATURE (5): Xaa equals any of the twenty naturally occurring L-amino acids
KWXVXNQENVSNLVIEDTELKQVAYIYKCVNTTLQIKGKINSITVDNCKKLGLVFDDVVGIVEIINSKDVKVQVMGKVPTISINKTDGCHAYLSKNSLDCEIVSAKSSEMNVLIPTEGGDFNEFPVPEQFKTLWNGQKLVTTVTEIAG

SEQ ID NO: 4334 - protein, 130 aa, Homo sapiens
  MISC_FEATURE (1): Xaa equals any of the twenty naturally occurring L-amino acids
  MISC_FEATURE (2): Xaa equals any of the twenty naturally occurring L-amino acids
  MISC_FEATURE (8): Xaa equals any of the twenty naturally occurring L-amino acids
  MISC_FEATURE (11): Xaa equals any of the twenty naturally occurring L-amino acids
  MISC_FEATURE (17): Xaa equals any of the twenty naturally occurring L-amino acids
  MISC_FEATURE (71): Xaa equals any of the twenty naturally occurring L-amino acids
  MISC_FEATURE (72): Xaa equals any of the twenty naturally occurring L-amino acids
  MISC_FEATURE (90): Xaa equals any of the twenty naturally occurring L-amino acids
  MISC_FEATURE (92): Xaa equals any of the twenty naturally occurring L-amino acids
  MISC_FEATURE (97): Xaa equals any of the twenty naturally occurring L-amino acids
  MISC_FEATURE (110): Xaa equals any of the twenty naturally occurring L-amino acids
  MISC_FEATURE (112): Xaa equals any of the twenty naturally occurring L-amino acids
XXYRESLXISXERPGIXGSTHASASSCLRMAAARGPPSSRPWACGYAQRQAAKSPGSPAYCLSSTSLFKRXXPTLPASCAGRRWRQGLPXRXGKQNXTNGIYCRVQNRAXAXDNISHPDPSSLALPLCMV

SEQ ID NO: 4335 - protein, 80 aa, Homo sapiens
  MISC_FEATURE (5): Xaa equals any of the twenty naturally occurring L-amino acids
VAVWXEWVRRPQHSCSLRHFGRMSGASPAGARASRAGGPPRPTAPREHPTSLCDVAFSPSACKGPICHRKRQPLLFSFVF

SEQ ID NO: 4336 - protein, 107 aa, Homo sapiens
  MISC_FEATURE (30): Xaa equals any of the twenty naturally occurring L-amino acids
  MISC_FEATURE (33): Xaa equals any of the twenty naturally occurring L-amino acids
  MISC_FEATURE (48): Xaa equals any of the twenty naturally occurring L-amino acids
  MISC_FEATURE (49): Xaa equals any of the twenty naturally occurring L-amino acids
  MISC_FEATURE (59): Xaa equals any of the twenty naturally occurring L-amino acids
  MISC_FEATURE (89): Xaa equals any of the twenty naturally occurring L-amino acids
  MISC_FEATURE (95): Xaa equals any of the twenty naturally occurring L-amino acids
  MISC_FEATURE (97): Xaa equals any of the twenty naturally occurring L-amino acids
  MISC_FEATURE (99): Xaa equals any of the twenty naturally occurring L-amino acids
  MISC_FEATURE (106): Xaa equals any of the twenty naturally occurring L-amino acids
LGLLCPYSGKASVSLAASTPTSLTLRGLAXRVXLAAGAATLPAAPLAXXPSTRAQGPQXGTCRLGHTGLAWPEVSLMLGWVRPHLPGRXRQVGGXTXKXAGLGPIXG

SEQ ID NO: 4337 - protein, 228 aa, Homo sapiens
  MISC_FEATURE (60): Xaa equals any of the twenty naturally occurring L-amino acids
  MISC_FEATURE (133): Xaa equals any of the twenty naturally occurring L-amino acids
  MISC_FEATURE (181): Xaa equals any of the twenty naturally occurring L-amino acids
  MISC_FEATURE (192): Xaa equals any of the twenty naturally occurring L-amino acids
  MISC_FEATURE (194): Xaa equals any of the twenty naturally occurring L-amino acids
  MISC_FEATURE (200): Xaa equals any of the twenty naturally occurring L-amino acids
  MISC_FEATURE (210): Xaa equals any of the twenty naturally occurring L-amino acids
ATMTEQAISFAKDFLAGGIAAAISKTAVAPIERVKLLLQVQHASKQIAADKRYKGIVDCXVRIPKEQGVLSFWRGNLANVIRYFPTQALNFAFKDKYKQIFLGGVDKHTQFWRYFAGNLASGGAAGATSLCFXYPLDFARTRLAADVGKSGTEREFRGLGDCLVKITKSDGIRGLYQGFSXSVQGIIIYRAXYXGVYDTXKGMLPRPKNXHIVVKLDDRAKRDGRGRR

SEQ ID NO: 4338 - protein, 198 aa, Homo sapiens
  MISC_FEATURE (6): Xaa equals any of the twenty naturally occurring L-amino acids
  MISC_FEATURE (118): Xaa equals any of the twenty naturally occurring L-amino acids
  MISC_FEATURE (150): Xaa equals any of the twenty naturally occurring L-amino acids
  MISC_FEATURE (189): Xaa equals any of the twenty naturally occurring L-amino acids
  MISC_FEATURE (197): Xaa equals any of the twenty naturally occurring L-amino acids
AGVVMXLAWTAMGGSTLFVETSLRRPQDKDAKGDKDGSLEVTGQLGEVMKESARIAYTFARAFLMQHAPANDYLVTSHIHLHVPEGATPKDGPSAGCTIVTALLSLAMGRPVRQNLAXTGEVSLTGKILPVGGIKEKTIAAKRAGVTCIXLPAENKKDFYDLAAFITEGLEVHFVEHYREIFDIAFPDXQAEALAVXR

SEQ ID NO: 4339 - protein, 105 aa, Homo sapiens
  MISC_FEATURE (98): Xaa equals any of the twenty naturally occurring L-amino acids
  MISC_FEATURE (104): Xaa equals any of the twenty naturally occurring L-amino acids
  MISC_FEATURE (105): Xaa equals any of the twenty naturally occurring L-amino acids
GSLLSPDMANKGPSYGMSREVQSKIEKKYDEELEERLVEWIIVQCGPDVGRPDRGRLGFQVWLKNGVILSKLVNSLYPDGSKPGEGAREPTLHGSSSXMEQVLXX

SEQ ID NO: 4340 - protein, 106 aa, Homo sapiens
  MISC_FEATURE (91): Xaa equals any of the twenty naturally occurring L-amino acids
  MISC_FEATURE (100): Xaa equals any of the twenty naturally occurring L-amino acids
ADEVCRIFYDMKVRKCSTPEEIKKRKKAVIFCLSADKKCIIVEEGKEILVGDVGVTITDPFKHFVGMLLKKIVAMLCMMQALKQKNSEKKXLMFFWGAPXLGTFKK

SEQ ID NO: 4341 - protein, 34 aa, Homo sapiens
RLETMFLFFKTLDTDLDGVVTFDLFKWLQLTMFA

SEQ ID NO: 4342 - protein, 244 aa, Homo sapiens
  MISC_FEATURE (5): Xaa equals any of the twenty naturally occurring L-amino acids
  MISC_FEATURE (229): Xaa equals any of the twenty naturally occurring L-amino acids
  MISC_FEATURE (234): Xaa equals any of the twenty naturally occurring L-amino acids
  MISC_FEATURE (243): Xaa equals any of the twenty naturally occurring L-amino acids
  MISC_FEATURE (244): Xaa equals any of the twenty naturally occurring L-amino acids
GERKXEKLLFGISGTPAGTGPEFPGRPTRPEIVMTQSPVTLSVSPGGSATLSCRASQTVAGNVAWYQQKPGQAPRLLVYAASSRATAIPARFSGSGSGTEFTLSIGSLQSEDVALYYCQQYNTWPLTFGGGTKVEIKRTVAAPSVFIFPPSDEQLKSGTASVVCLLNNFYPREAKVQWKVDNALQSGNSQESVTEQDSKDSTYSLSSTLTLSKADYEKHKVYACEVTHXGLSLXVTKSFNRGXX

SEQ ID NO: 4343 - protein, 243 aa, Homo sapiens
  MISC_FEATURE (7): Xaa equals any of the twenty naturally occurring L-amino acids
  MISC_FEATURE (11): Xaa equals any of the twenty naturally occurring L-amino acids
  MISC_FEATURE (213): Xaa equals any of the twenty naturally occurring L-amino acids
  MISC_FEATURE (228): Xaa equals any of the twenty naturally occurring L-amino acids
  MISC_FEATURE (235): Xaa equals any of the twenty naturally occurring L-amino acids
  MISC_FEATURE (239): Xaa equals any of the twenty naturally occurring L-amino acids
EGNGTIXNVGXPAGTGPEFPGRPTRPARACGARIVSRPEERREDDVGTGAGLLEIKKIGDEYFTFITDCKDPKACTILLRGASKEILSEVERNLQDAMQVCRNVLLDPQLVPGGGASEMAVAHALTEKSKAMTGVEQWPYRAVAQALEVIPRTLIQNCGASTIRLLTSLRAKHTQENCETWGVNGETGTLVDMKELGIWEPLAVKLQTYKTAXETAVLLLRIDDIVSXHKKKGDXQKPXRRGS

SEQ ID NO: 4344 - protein, 213 aa, Homo sapiens
  MISC_FEATURE (8): Xaa equals any of the twenty naturally occurring L-amino acids
  MISC_FEATURE (11): Xaa equals any of the twenty naturally occurring L-amino acids
  MISC_FEATURE (31): Xaa equals any of the twenty naturally occurring L-amino acids
TGKGNTRXVGXACRYRSGIPGSTHASAENSXNEEETSSEGNMRVHAVDSCMSFQCKRGHICKADQQGKPHCVCQDPVTCPPTKPLDQVCGTDNQTYASSCHLFATKCRLEGTKKGHQLQLDYFGACKSIPTCTDFEVIQFPLRMRDWLKNILMQLYEANSEHAGYLNEKQRNKVKKIYLDEKRLLAGDHPIDLLLRDFKKNYHMYVYPVHWQV

SEQ ID NO: 4345 - protein, 41 aa, Homo sapiens
SLAYSLSYLLIFFSRKQVTFVSTIKIFIQNLLPQTESHQEN

SEQ ID NO: 4346 - protein, 121 aa, Homo sapiens
  MISC_FEATURE (70): Xaa equals any of the twenty naturally occurring L-amino acids
TGATMQCFSFIKTMMILFNLLIFLCGAALLAVGIWVSIDGASFLKIFGPLSSSAMQFVNVGYFLIAAGVXVFALGFLGCYGAKTESKCALVTFFFILLLIFIAEVAAAVVAWCTPQWLSTS

SEQ ID NO: 4347 - protein, 153 aa, Homo sapiens
  MISC_FEATURE (133): Xaa equals any of the twenty naturally occurring L-amino acids
VERGLRVIEMEREGKGRISTSTGISPQMEVTCVPTPTSTVSSIGNTNGEEVGPSVYLERLKILRQRCGLDNTKQDDRPPLTSLLSKPAVPTVASSTDMLHSKLSQLRESREQHQHSDLDSNQTHSSGTVTSSXFTANIDDLKKRLERIKSSRK

SEQ ID NO: 4348 - protein, 91 aa, Homo sapiens
  MISC_FEATURE (44): Xaa equals any of the twenty naturally occurring L-amino acids
  MISC_FEATURE (52): Xaa equals any of the twenty naturally occurring L-amino acids
  MISC_FEATURE (73): Xaa equals any of the twenty naturally occurring L-amino acids
  MISC_FEATURE (75): Xaa equals any of the twenty naturally occurring L-amino acids
  MISC_FEATURE (76): Xaa equals any of the twenty naturally occurring L-amino acids
  MISC_FEATURE (81): Xaa equals any of the twenty naturally occurring L-amino acids
  MISC_FEATURE (83): Xaa equals any of the twenty naturally occurring L-amino acids
  MISC_FEATURE (89): Xaa equals any of the twenty naturally occurring L-amino acids
NPSNPLNEALCLREILFLDISDTRFSLRGGIHIQYTEFIQLSMXQYIKEARXLNFLKFSMGFHLKGFRKTLNXWXXLDGRXTXLKLKGXKE

SEQ ID NO: 4349 - protein, 88 aa, Homo sapiens
  MISC_FEATURE (2): Xaa equals any of the twenty naturally occurring L-amino acids
  MISC_FEATURE (6): Xaa equals any of the twenty naturally occurring L-amino acids
  MISC_FEATURE (8): Xaa equals any of the twenty naturally occurring L-amino acids
  MISC_FEATURE (9): Xaa equals any of the twenty naturally occurring L-amino acids
  MISC_FEATURE (12): Xaa equals any of the twenty naturally occurring L-amino acids
  MISC_FEATURE (42): Xaa equals any of the twenty naturally occurring L-amino acids
  MISC_FEATURE (43): Xaa equals any of the twenty naturally occurring L-amino acids
  MISC_FEATURE (84): Xaa equals any of the twenty naturally occurring L-amino acids
  MISC_FEATURE (88): Xaa equals any of the twenty naturally occurring L-amino acids
LXGVEXAXXLMXFSCLNQKSNLYCLKPTICSDQDNYCVTVSXXAGIGNLVTFGHSLESLSPCSPLPWHKLHALQGQAFGGWGFXQFRX

SEQ ID NO: 4350 - protein, 167 aa, Homo sapiens
  MISC_FEATURE (21): Xaa equals any of the twenty naturally occurring L-amino acids
  MISC_FEATURE (25): Xaa equals any of the twenty naturally occurring L-amino acids
  MISC_FEATURE (26): Xaa equals any of the twenty naturally occurring L-amino acids
  MISC_FEATURE (27): Xaa equals any of the twenty naturally occurring L-amino acids
  MISC_FEATURE (35): Xaa equals any of the twenty naturally occurring L-amino acids
  MISC_FEATURE (39): Xaa equals any of the twenty naturally occurring L-amino acids
  MISC_FEATURE (59): Xaa equals any of the twenty naturally occurring L-amino acids
  MISC_FEATURE (63): Xaa equals any of the twenty naturally occurring L-amino acids
  MISC_FEATURE (66): Xaa equals any of the twenty naturally occurring L-amino acids
  MISC_FEATURE (87): Xaa equals any of the twenty naturally occurring L-amino acids
  MISC_FEATURE (90): Xaa equals any of the twenty naturally occurring L-amino acids
  MISC_FEATURE (91): Xaa equals any of the twenty naturally occurring L-amino acids
  MISC_FEATURE (99): Xaa equals any of the twenty naturally occurring L-amino acids
  MISC_FEATURE (101): Xaa equals any of the twenty naturally occurring L-amino acids
  MISC_FEATURE (102): Xaa equals any of the twenty naturally occurring L-amino acids
  MISC_FEATURE (110): Xaa equals any of the twenty naturally occurring L-amino acids
  MISC_FEATURE (115): Xaa equals any of the twenty naturally occurring L-amino acids
  MISC_FEATURE (116): Xaa equals any of the twenty naturally occurring L-amino acids
  MISC_FEATURE (118): Xaa equals any of the twenty naturally occurring L-amino acids
  MISC_FEATURE (119): Xaa equals any of the twenty naturally occurring L-amino acids
  MISC_FEATURE (125): Xaa equals any of the twenty naturally occurring L-amino acids
  MISC_FEATURE (129): Xaa equals any of the twenty naturally occurring L-amino acids
  MISC_FEATURE (130): Xaa equals any of the twenty naturally occurring L-amino acids
  MISC_FEATURE (131): Xaa equals any of the twenty naturally occurring L-amino acids
  MISC_FEATURE (136): Xaa equals any of the twenty naturally occurring L-amino acids
  MISC_FEATURE (138): Xaa equals any of the twenty naturally occurring L-amino acids
  MISC_FEATURE (140): Xaa equals any of the twenty naturally occurring L-amino acids
  MISC_FEATURE (143): Xaa equals any of the twenty naturally occurring L-amino acids
  MISC_FEATURE (150): Xaa equals any of the twenty naturally occurring L-amino acids
  MISC_FEATURE (151): Xaa equals any of the twenty naturally occurring L-amino acids
  MISC_FEATURE (154): Xaa equals any of the twenty naturally occurring L-amino acids
  MISC_FEATURE (164): Xaa equals any of the twenty naturally occurring L-amino acids
SCDKTHTCPPCPVPELLGGPXVFLXXXKPKDTLMXSRTXEVTCVVVDVSHEDPEVKFNXYVDXVEXHNAKTKPREEHVQQHCTVWAXVLXXWNQGLGLXGXXGYQGAKGXSNQKXXFXXPPNLGXKTHXXXKGLKXGXRXPPXENPTRVXXPTXLAPSQFPRGXGKN

SEQ ID NO: 4351 - protein, 54 aa, Homo sapiens
  MISC_FEATURE (9): Xaa equals any of the twenty naturally occurring L-amino acids
  MISC_FEATURE (27): Xaa equals any of the twenty naturally occurring L-amino acids
  MISC_FEATURE (37): Xaa equals any of the twenty naturally occurring L-amino acids
  MISC_FEATURE (42): Xaa equals any of the twenty naturally occurring L-amino acids
GCKTIQLVXLRRSLLEGADHNAICYVXRVKILWEKNXDIQLXDFSDRFIGGGII

SEQ ID NO: 4352 - protein, 166 aa, Homo sapiens
  MISC_FEATURE (1): Xaa equals any of the twenty naturally occurring L-amino acids
  MISC_FEATURE (7): Xaa equals any of the twenty naturally occurring L-amino acids
  MISC_FEATURE (11): Xaa equals any of the twenty naturally occurring L-amino acids
  MISC_FEATURE (12): Xaa equals any of the twenty naturally occurring L-amino acids
  MISC_FEATURE (14): Xaa equals any of the twenty naturally occurring L-amino acids
  MISC_FEATURE (32): Xaa equals any of the twenty naturally occurring L-amino acids
  MISC_FEATURE (119): Xaa equals any of the twenty naturally occurring L-amino acids
  MISC_FEATURE (121): Xaa equals any of the twenty naturally occurring L-amino acids
XKLLWEXSHYXXKXVRLQVPVRNSRVDPCVRXGYVLSSIEGRVAVEYLDPSPEVQKKKYAFKCHRLKENNIEQIYPVNAISFHNIHNTFATGGSDGFVNIWDPFNKKRLCQFHRYPTSXAXLAFSNDGTTLAIASSYMYEMDDTEHPEDGIFIRQVTDAETKPKST

SEQ ID NO: 4353 - protein, 130 aa, Homo sapiens
  MISC_FEATURE (4): Xaa equals any of the twenty naturally occurring L-amino acids
  MISC_FEATURE (6): Xaa equals any of the twenty naturally occurring L-amino acids
  MISC_FEATURE (14): Xaa equals any of the twenty naturally occurring L-amino acids
  MISC_FEATURE (28): Xaa equals any of the twenty naturally occurring L-amino acids
  MISC_FEATURE (37): Xaa equals any of the twenty naturally occurring L-amino acids
  MISC_FEATURE (129): Xaa equals any of the twenty naturally occurring L-amino acids
GTRXKXPAGTGPEXRVDPRVAFTCGGSXTVSEPLLAXSLPFLVPIVFGSSLEFYQHKPFFAPVHITELKLLPNTNKQDGCNLGNIESTTLGLPLGSPSTGGLLGTGSVVSHLETLDIWALSYNFQHPPXS

SEQ ID NO: 4354 - protein, 56 aa, Homo sapiens
  MISC_FEATURE (44): Xaa equals any of the twenty naturally occurring L-amino acids
  MISC_FEATURE (46): Xaa equals any of the twenty naturally occurring L-amino acids
AGVRVLCFWGLAEMCLSAVARSGGRGGLVEIFCYDVCVESGCAXIXLLLLCPTSIN

SEQ ID NO: 4355 - protein, 59 aa, Homo sapiens
AQIKMFEERNFIFASYVQFLCLRYFNMLCILELLQLDASCFYSSLWGALERACVHVFFF

SEQ ID NO: 4356 - protein, 65 aa, Homo sapiens
  MISC_FEATURE (51): Xaa equals any of the twenty naturally occurring L-amino acids
KRQDIKSDGFSIETCKIMVDMLNSDGSGKLGLKEFYILWTKIQKYQVRSQXCGWICVGKHSVHML

SEQ ID NO: 4357 - protein, 55 aa, Homo sapiens
  MISC_FEATURE (4): Xaa equals any of the twenty naturally occurring L-amino acids
  MISC_FEATURE (18): Xaa equals any of the twenty naturally occurring L-amino acids
  MISC_FEATURE (20): Xaa equals any of the twenty naturally occurring L-amino acids
  MISC_FEATURE (21): Xaa equals any of the twenty naturally occurring L-amino acids
  MISC_FEATURE (25): Xaa equals any of the twenty naturally occurring L-amino acids
  MISC_FEATURE (28): Xaa equals any of the twenty naturally occurring L-amino acids
  MISC_FEATURE (35): Xaa equals any of the twenty naturally occurring L-amino acids
  MISC_FEATURE (38): Xaa equals any of the twenty naturally occurring L-amino acids
  MISC_FEATURE (55): Xaa equals any of the twenty naturally occurring L-amino acids
IDAXFLFSLAVNKSAPNXKXXKRAXALXDPSLRTXCMXRHSSSIGVHLNSIHWAX

SEQ ID NO: 4358 - protein, 145 aa, Homo sapiens
KLTYACMRRHSSSIVSPKFNSLAVVLQRRDWENPGVTQLNRLAAHPPFASWRNSEEARTDRPSQQLRSLNGEWDAPCSGALSAAGVVVTRSVTATLASALAPAPFAFFPSFLATFAGFPRQALNRGLPLGFRFSALRHLDPKKLD

SEQ ID NO: 4359 - protein, 56 aa, Homo sapiens
LGCMLIKLEIQLFAVWWVGFGVTSSTCHTGYQRIRKLLSMSVFYKLSEFFRCLNIF

SEQ ID NO: 4360 - protein, 100 aa, Homo sapiens
  MISC_FEATURE (2): Xaa equals any of the twenty naturally occurring L-amino acids
  MISC_FEATURE (4): Xaa equals any of the twenty naturally occurring L-amino acids
  MISC_FEATURE (5): Xaa equals any of the twenty naturally occurring L-amino acids
  MISC_FEATURE (22): Xaa equals any of the twenty naturally occurring L-amino acids
  MISC_FEATURE (35): Xaa equals any of the twenty naturally occurring L-amino acids
GXLXXCRYRSGIPGSTHASGGXFINLRLSETWVRXYQVLPDRSHPKLLMSGGGGYLLSGFTVAMDNLKADTSLKSNASTLESHETEEPAAKKRKCPESDS
